(19) United States
(12) Patent Application Publication
(10) Pub. No.: US 2009/0300794 A1
(43) Pub. Date: Dec. 3, 2009

(54) Manipulation Of The Nitrogen Metabolism

(75) Inventors: Gunnar Plesch, Potsdam (DE); Piotr Puzio, Berlin (DE); Astrid Blau, Stahnsdorf (DE); Ralf Looser, Berlin (DE); Birgit Wendel, Berlin (DE); Beate Kamlage, Berlin (DE); Oliver Schmitz, Dallgow-Doberitz (DE)

Correspondence Address: CONNOLLY BOVE LODGE & HUTZ, LLP, P O BOX 2207, WILMINGTON, DE, 19899, US

(73) Assignee: Metanomics GmbH, Berlin (DE)

(21) Appl. No.: 12/302,421

(22) PCT Filed: May 23, 2007
(86) PCT No.: PCT/EP2007/054979

§ 371 Date: Nov. 25, 2008

(30) Foreign Application Priority Data
May 31, 2006 (EP) 06114744.3

(51) Int. Cl. C12N 15/82; C12N 5/04; C12N 15/29; C12N 5/10; C12P 21/02; C07K 14/415; C07K 16/16; A01H 5/00; C12N 1/21; C12Q 1/68; A01H 5/10

(52) U.S. Cl. 800/278; 435/420; 536/23.6; 435/320.1; 435/419; 435/69.1; 530/370; 530/387.9; 800/300; 435/252.3; 435/6

(57) ABSTRACT

The present invention relates to the manipulation of the nitrogen metabolism in photosynthetic active organisms, preferably in plants. In particular, the present invention relates to a process for the enhanced nitrogen assimilation, accumulation and/or utilization and/or for the increased total nitrogen content in a photosynthetic active organism.

[0001] The present invention relates to the manipulation of the nitrogen metabolism in photosynthetic active organisms, preferably in plants. In particular, the present invention relates to a process for the enhanced nitrogen assimilation, accumulation and/or utilization and/or for the increased total nitrogen content in a photosynthetic active organism.

[0002] Plant nutrition assimilation is essential to the growth and development of plants and therefore also for quantity and quality of plant products. Because of the strong influence of nutrition utilization efficiency on plant yield and product quality, a huge amount of fertilizer is poured onto fields to optimize plant growth and quality. Productivity of plants ordinarily is limited by three primary nutrients, phosphorous, potassium and nitrogen, which is usually the rate-limiting element in plant growth of these three. Therefore the major nutritional element required for plant growth is nitrogen (N). It is a constituent of numerous important compounds found in living cells, including amino acids, proteins (enzymes), nucleic acids, and chlorophyll. 1.5% to 2% of plant dry matter is nitrogen and approximately 16% of total plant protein. Thus, nitrogen availability is a major limiting factor for crop plant growth and production (Frink et al., 1999), and has as well a major impact on protein accumulation and amino acid composition.

[0003] Plant can utilize a wide range of nitrogen species including volatile ammonia (NH3), nitrogen oxides (NOx), mineral nitrogen, like nitrate(NO3−) and ammonium salts (NH4+), urea and urea derivates, and organic nitrogen (amino acids, peptides, etc.). Some plants are able to utilize the atmospheric nitrogen by symbiotic bacteria or certain fungi. However, in most agricultural soils, nitrate (NO3−) is the most important source of nitrogen (Crawford and Glass, 1998; Hirsch and Sussman, 1999). Nevertheless also ammonium NH4+ plays an important probably underestimated role, because most plants preferentially take up NH4+ when both forms are present—even if NH4+ is present at lower concentrations than NO3− (Von Wiren et al., 2000).

[0004] Because of the high nitrogen requirements for crop plants, nitrogen fertilization is a major worldwide agricultural investment, with 80 million metric tons of nitrogen fertilizers (as nitrate and/or ammonium) applied annually (Frink et al., 1999). There are also negative environmental consequences for the extensive use of nitrogen containing fertilizers in crop production because agricultural crops only retain about two-thirds of the applied nitrogen. Therefore high inputs of fertilizer are followed by large outputs by leaching, gaseous losses and crop removal. The unabsorbed nitrogen can subsequently leach into the soil and contaminate water supplies (Frink et al., 1999). Because of the high leaching losses of nitrogen from agricultural ecosystems to groundwater and surface water, nitrogen is now recognized as an important pollutant. Nitrogen leaching, namely as nitrate from agricultural lands, affects drinking water quality and causes eutrophication of lakes and coastal areas. Abundant use of nitrogen containing fertilizers can further lead to final deterioration of soil quality, to environmental pollution and health hazards.

[0005] Because of the high costs of nitrogen fertilizer to agricultural production, and additionally its deleterious effect on the environment, it is desirable to develop strategies to reduce nitrogen input and/or to optimize nitrogen assimilation, accumulation and/or utilization by a given nitrogen availability while simultaneously maintaining optimal productivity and quality of photosynthetic active organisms, preferably cultivated plants, e.g. crops.

[0006] Preferably the cultivated plants used as food and/or feed should have an improved quality, especially in terms of protein accumulation and composition.

[0007] For efficient nitrogen uptake assimilation, accumulation and utilization, complex processes associated with absorption, translocation, assimilation, and redistribution of nitrogen are required to operate effectively. Differences in nitrogen absorption and utilization between genotypes have been demonstrated for several species by different researchers (Chang & Robison, 2001). Considerable evidence of genotypic differences in nitrogen uptake e.g. accumulation has also been reported for maize and canola (Weisler et al., 2001; Gallais & Hirel, 2004).

[0008] Nitrate uptake in plants is highly regulated and coordinated with other transport and metabolic pathways (Crawford, 1995), and a number of nitrate uptake and assimilation-related genes have been identified and characterized (Forde, 2002). Plants absorb nitrate via transporters localized to the root epidermal and cortical cell plasma membrane over a wide nitrate concentration range using several different transport mechanisms, including constitutive and nitrate-inducible high-affinity transport systems, as well as nitrate-inducible low-affinity transporters (Stitt, 1999). Once in the root cell cytoplasm, nitrate may be stored in the vacuole for later use, transported into the xylem and translocated to the shoot for assimilation and/or storage, released back into the rhizosphere, or reduced to nitrite and then ammonia via nitrate reductase (NR) and nitrite reductases (NiR). The reduction of nitrate to nitrite and then ammonia generates nitrogen in a form that can be assimilated into amino acids via the GOGAT pathway (Stitt, 1999). In order to be incorporated into amino acids, nucleic acids, and other compounds, NO⁻₃ must be reduced to NH⁺₄. NR (nitrate reductase) is the first enzyme in the process of NO⁻₃ reduction to amino form. It is a substrate-inducible enzyme and is thought to be the most limiting step in nitrogen assimilation.

[0009] The in-situ rate of NO⁻₃ reduction is controlled primarily by the rate of NO⁻₃ uptake, rather than by alterations in nitrate reductase activity (NRA) or limitations in reducing power. Thus, NO⁻₃ uptake appears to be of primary importance in nitrogen assimilation in NO⁻₃-fed plants. Genetic variation in NRA is well documented in several species. NRA is affected by factors such as environmental conditions and plant developmental stages, as well as plant part, such as roots and tops. Furthermore, in vivo and in vitro assays usually give different results. Variable results were found by several researchers in their efforts to relate NRA to grain yield and N-related traits such as total reduced plant N, grain nitrogen content, grain nitrogen concentration, and nitrogen harvest index.

[0010] In order to describe the efficiency of the complete pathway of nitrogen, starting with the uptake from soil, assimilating, accumulating and finally utilizing the nitrogen for growth till maturity and for ripeness of fruits and seeds, different approaches are known. In light of the importance of optimal nitrogen acquisition and utilization, different strategies have been followed for plant optimizations.

[0011] U.S. Pat. No. 6,727,411 discloses a method of producing transgenic tomatoes having an increased free amino acid content in tomato fruits by transforming a tomato with a genetic construct containing the antisense sequence of a gene encoding glutamate decarboxylase.

[0012] In some cases enzymes of the nitrogen assimilation pathway were overexpressed. Although initially unsuccessful like the overexpression of a cytosolic glutamine synthetase gene in Lotus (Vincent et al., Planta. 201(4):424-33, 1997), recent documents show at least some success. WO95/09911 describes the overexpression of glutamine-synthetase, asparagine-synthetase and asparaginase in transgenic plant for application in enhanced nitrogen-fixation and improved yield. Chichkova et al., J. Exp. Bot.; (2001) reported that transgenic tobacco plants that overexpress alfalfa NADH-glutamate-synthase have higher carbon and nitrogen content, but not a specific enrichment in nitrogen in comparison to carbon. In other case, for example as described in Long et al., Plant-Physiol.; (1996) 111, 2, Suppl., 48, the overexpression of a nitrogen assimilation gene, in this case the Escherichia coli glutamate-dehydrogenase, did not lead to a relative increase in nitrogen content, but rather to an significant increase in fresh weight and dry weight. In another case, overexpression of the ASN1 gene enhances the nitrogen status in seeds of Arabidopsis (Lam et al., Plant Physiology, 2003, 321, 926-935. In seeds of those overexpressing lines the authors observed the elevation of soluble seed protein contents, elevation of total protein, contents from acid-hydrolyzed seeds and a higher tolerance of young seedlings when grown under nitrogen-limiting conditions, demonstrating that those traits are tightly interlinked.

[0013] The U.S. Pat. No. 6,969,782 disclose plants containing free amino acids accumulated in a large amount by excessive expression of glutamate dehydrogenase (GDH).

[0014] United States Patent Application 20030115638 provides a transformed plant having free-amino acid content increased by introducing phosphoenolpyruvate carboxylase (PEPC) genes.

[0015] Plants with elevated levels of nitrogen utilization proteins in the root of those plants are disclosed in US 20050044585 by expression of an alanine aminotransferase gene.

[0016] A different interesting approach was followed by Yanagisawa et al., PNAS (2004) 101, 20, 7833-7838. The authors identified and overexpressed a regulatory factor, which induced the up-regulation of genes encoding enzymes for carbon skeleton production, a marked increase of amino acid contents, and a reduction of the glucose level in transgenic Arabidopsis. Elementary analysis revealed that the nitrogen content increased in transgenic plants (approximate to 30%), indicating promotion of net nitrogen assimilation. Most significantly, the Dof1 transgenic plants exhibit improved growth under low-nitrogen conditions, an agronomically important trait. Although looking promising, this approach likely has the drawback, that it relies on a plant transcription factor and the complex corresponding signalling cascade which both might be the subject of different internal regulatory and feedback mechanism modifying or even diminishing the desired effect at least under certain conditions. In addition the function of a plant transcription factor relies on its interaction with its target sequences in different promoters, making the transfer of results between different plant species complex and unpredictable.

[0017] Nevertheless, there is a need for photosynthetic active organisms that are capable to assimilate and accumulate nitrogen more efficiently. In addition, the photosynthetic active organisms have to be capable of a more efficient utilization of nitrogen so that less nitrogen is required for the same yield or higher yields may be obtained with current levels of nitrogen use.

[0018] There is furthermore a need for photosynthetic active organisms that show an increased biomass yield, preferably with a faster growth rate, which may lead in a greater fruit or seed yield.

[0019] The new photosynthetic active organisms shall present a greater but defined (relating to the proportion of the different amino acids) amino acid content in the fruit or seed or in the whole organism.

[0020] The new photosynthetic active organisms shall present a greater but defined (relating to the proportion of the different amino acids) protein content in the fruit or seed or in the whole organism.

[0021] The new photosynthetic active organisms shall show at least one of these traits also under conditions of reduced nitrogen content in the surrounding medium, soil or environment.

[0022] In one embodiment of the resent invention, this traits are attained by a process for the enhanced nitrogen assimilation, accumulation and/or utilization in a photosynthetic active organism leading to a increased total nitrogen content in the fruit or seed or in the whole organism.

[0023] In one embodiment of the resent invention, this achieved by an increased nitrogen use efficiency (NUE).

[0024] In one embodiment of the present invention, the NUE is defined as the grain yield per unit of nitrogen available from the soil, including nitrogen fertilizer.

[0025] In an other embodiment of the present invention, the NUE is defined according to Reynolds, M. P., J. J. Ortiz-Monasterio, and A. McNab (eds.), 2001. Application of Physiology in Whaet Breeding, Mexico, D.F.:CIMMYT, which is incorporated by reference.

[0026] In an other embodiment of the present invention, the NUE is defined as the biomass yield per unit of nitrogen available from the soil, including nitrogen fertilizer.

[0027] In an other embodiment of the present invention, the NUE is defined as the total nitrogen content of the photosynthetic active organism per unit of nitrogen available from the soil, including nitrogen fertilizer.

[0028] Plants can take up nitrogen also in the form of ammonium. Although the average NH4+ concentrations in soil are often 10 to 1000 times lower than those of NO3− (Marschner H L, Mineral Nutrition in Higher Plants. London: Academic Press; 1995), the difference in soil concentrations does not necessarily reflect the uptake ration of each nitrogen source. Plants take up NH4+ preferentially when both forms of nitrogen are available, eventually because its assimilation requires less energy because NO3− has to be reduced prior to assimilation (Bloom et al., Plant Phys. 1992, 1294-1301).

[0029] Ammonium uptake systems have been characterized in different organisms, including yeast and plants. The yeast Saccharomyces cerevisiae contains three MEP genes for ammonium transporters, which are all controlled by nitrogen, being repressed in the presence of an nitrogen source that is readily metabolised, such as NH4+ (Marini et al., Mol Cell Biol 1997, 17:4282-4293) Plant genes encoding ammonium transports systems have been cloned by complementation of a yeast mutant, homology searches in databases and heterologous hybridisations (Reviewed in van Wieren et al., Current Opinion in Plant Biology, 200, 3:254-261. Experimental evidence of the physiological function of NH4+ transporters mainly rely on correlations between ammonium transporter expression and influx of labeled ammonium. The situation is complicated by the fact, that in Arabidopsis but also other plants ammonium transporters are present in gene families, the members of which have different expression patterns and physiological characteristics. Although DE 4337597 claims sequences for plant ammonium transporters and their use for manipulation of the nitrogen metabolism and plant growth under certain conditions, any evidence for positive effects on nitrogen assimilation or plant growth under certain conditions through ectopic expression of the plant ammonium transporters were missing. Therefore literature evidence for the engineering of nitrogen assimilation in plants is still limited to a few cases, not including transporters.

[0030] It is an object of the present invention to develop an inexpensive process for an enhanced nitrogen assimilation, accumulation and/or utilization and/or for the increased total nitrogen content in a photosynthetic active organism leading to a increased total nitrogen content in the fruit or seed or in the whole organism and an increased nitrogen use efficiency (NUE).

[0031] It was now found that this object is achieved by providing the process according to the invention described herein and the embodiments characterized in the claims.

[0032] Accordingly, in a first embodiment, the invention relates to a process for the enhanced nitrogen assimilation, accumulation and/or utilization in a photosynthetic active organism.

[0033] Accordingly, in an other embodiment, the invention relates to a process for increasing the total nitrogen content in a photosynthetic active organism.

[0034] Accordingly, in one embodiment this is achieved by (increased) production of nitrogen or nitrogen containing compounds, whereby nitrogen or nitrogen containing compounds is a compound containing nitrogen (N). In one embodiment the term “nitrogen or nitrogen containing compounds” as used herein relates to “amino acid”, preferably phenylalanine, proline, aspartic acid, 5-oxoproline, and/or alanine, “heme-complex”, “purine” and/or “pyrimidine”-containing compounds and/or derivates. Further, in another embodiment the term “nitrogen or nitrogen containing compounds s” as used herein also relates to compositions of fine chemicals comprising N-containing compounds.

[0035] Accordingly, the present invention relates to a process comprising
[0036] (a) increasing or generating the activity of one or more of the protein as shown table II, column 3 encoded by the nucleic acid sequences as shown in table I, column 5, in a non-human organism or in one or more parts or compartments thereof and
[0037] (b) growing the organism under conditions which permit the production of nitrogen or nitrogen containing compounds, thus, N-containing compound and/or enhanced nitrogen assimilation, accumulation and/or utilization and/or increasing total nitrogen content, in said organism.

[0038] Accordingly, the present invention relates to a process for the production of a fine chemical comprising
[0039] (a) increasing or generating the activity of one or more proteins having the activity of a protein selected from the group as indicated in Table II, column 3, application no. 1 and/or 2 and/or 3, lines 1 and/or 2 and/or 3 and/or 4 and/or 5 respectively
   [0040] or having the sequence of a polypeptide encoded by a nucleic acid molecule indicated in Table I, column 5 or 7, application no. 1 and/or 2 and/or 3, in a non-human organism in one or more parts or compartments thereof and
[0041] (b) growing the organism under conditions which permit the production of nitrogen or nitrogen containing compounds, in particular N-containing compound.

[0042] Comprises/comprising and grammatical variations thereof when used in this specification are to be taken to specify the presence of stated features, integers, steps or components or groups thereof, but not to preclude the presence or addition of one or more other features, integers, steps, components or groups thereof. The term “Table I” used in this specification is to be taken to specify the content of Table I A and Table I B. The term “Table II” used in this specification is to be taken to specify the content of Table II A and Table II B. The term “Table I A” used in this specification is to be taken to specify the content of Table I A. The term “Table I B” used in this specification is to be taken to specify the content of Table I B. The term “Table II A” used in this specification is to be taken to specify the content of Table II A. The term “Table II B” used in this specification is to be taken to specify the content of Table II B. In one preferred embodiment, the term “Table I” means Table I B. In one preferred embodiment, the term “Table II” means Table II B.

[0043] The terms “enhanced” or “increase” mean at least a 10%, 20%, 30%, 40% or 50%, preferably at least 60%, 70%, 80%, 90% or 100%, more preferably 150%, 200%, 300%, 400% or 500% higher production of nitrogen or nitrogen containing compounds in comparison to the reference as defined below, e.g. that means in comparison to an organism without the aforementioned modification of the activity of a protein having the activity of a protein selected from the group as indicated in Table II, column 3, application no. 1 and/or application no. 2 and/or application no. 3 or encoded by nucleic acid molecule indicated in Table I, columns 5 or 7, application no. 1 and/or application no. 2 and/or application 3. The term compartment relates to all different subcellular compartments of a cell, including but not limited to mitochondria, vacuole, the nucleus, all types of plastids, such as amyloplasts, chloroplasts, chromoplasts, the extracellular space, the mitochondria, the endoplasmic reticulum, elaioplasts, peroxisomes, glycosomes, and other compartments.

[0044] Surprisingly it was found, that the transgenic expression of at least one of the Saccharomyces cerevisiae protein(s) indicated in Table II, Column 3, application no. 1 or application no. 2, lines 1 or 3 respectively and/or application no. 3, lines 4 and/or 5, and/or at least one of the Escherichia coli K12 protein(s) indicated in Table II, Column 3, application no. 2, line 2 in Arabidopsis thaliana conferred an increase in the N-containing compound content and/or conferred an enhanced nitrogen assimilation, accumulation and/or utilization and/or a increased total nitrogen content of the transformed organism.

[0045] Surprisingly it was found, that the transgenic expression of at least one of the Saccharomyces cerevisiae protein(s) indicated in Table II, Column 3, application no. 1, line 1 in Arabidopsis thaliana conferred an increase in the N-containing compound content and/or conferred an enhanced nitrogen assimilation, accumulation and/or utilization and/or a increased total nitrogen content of the transformed organism, when expressed in the host cells, preferably in the cytosol of the plant cells

[0046] Surprisingly it was found, that the transgenic expression of at least one of the Saccharomyces cerevisiae protein(s) indicated in Table II, Column 3, application no. 2, line 3 and/or application no. 3, line 4 and/or 5 and/or at least one of the Escherichia coli K12 protein(s) indicated in Table II, Column 3, application no. 2, line 2 in Arabidopsis thaliana conferred an increase in the N-containing compound content and/or conferred an enhanced nitrogen assimilation, accumulation and/or utilization and/or a increased total nitrogen content of the transformed organism, when expressed in the host cells, preferably when expressed in the plastids.

[0047] In accordance with the invention, the term “organism” as understood herein relates always to a non-human organism, in particular to a photosynthetic active organism, preferably plant organism or to a microorganism.

[0048] The sequence of YPR138C from Saccharomyces cerevisiae has been published in Goffeau et al., Science 274 (5287), 546-547,1996 and Bussey et al., Nature 387 (6632 Suppl), 103-105 (1997) and its activity is being defined as a NH⁴⁺ transporter. Accordingly, in one embodiment, the process of the present invention comprises the use of a gene product with an activity of ammonium transport protein; ammonium transporter nrgA superfamily, preferably a protein with a NH⁴⁺ transporter activity, from Saccharomyces cerevisiae or its homolog, e.g. as shown herein, for the production of nitrogen or nitrogen containing compounds, meaning of N-containing compound, and/or for conferring an enhanced nitrogen assimilation, accumulation and/or utilization and/or a increased total nitrogen content, in particular for increasing the amount of a N-containing compound in an organism or a part thereof, as mentioned.

[0049] Accordingly, in one embodiment, the process of the present invention comprises the use of a gene product with an activity of ammonium transport protein; ammonium transporter nrgA superfamily, preferably a protein with a NH⁴⁺ transporter activity, from Saccharomyces cerevisiae or its homolog, e.g. as shown herein, for the improved uptake and/or assimilation of nitrogen.

[0050] Accordingly, in one embodiment, the process of the present invention comprises the use of a gene product with an activity of ammonium transport protein; ammonium transporter nrgA superfamily, preferably a protein with a NH⁴⁺ transporter activity, from Saccharomyces cerevisiae or its homolog, e.g. as shown herein, for the increased uptake and/or utilization and/or assimilation of nitrogen under nitrogen limited conditions.

[0051] The sequence of YNL241C (Accession number NP_{—}014158) from Saccharomyces cerevisiae has been published in Goffeau et al., Science 274 (5287), 546-547,1996 and Philippsen et al., Nature 387 (6632 Suppl), 93-98 (1997), and its activity is being defined as “glucose-6-phosphate dehydrogenase (Zwf1p)”. Accordingly, in one embodiment, the process of the present invention comprises the use of said “glucose-6-phosphate dehydrogenase” or its homolog, preferably in plastids, e.g. as shown herein, for the production of nitrogen or nitrogen containing compounds and/or for conferring an enhanced nitrogen assimilation, accumulation and/or utilization and/or a increased total nitrogen content, meaning of a N-containing compound, in particular for increasing the amount of a N-containing compound in an organism or a part thereof, as mentioned.

[0052] Accordingly, in one embodiment, the process of the present invention comprises the use of said “glucose-6-phosphate dehydrogenase” or its homolog, preferably in plastids, e.g. as shown herein, for the production of nitrogen or nitrogen containing compounds and/or for conferring an enhanced nitrogen assimilation, accumulation and/or utilization and/or a increased total nitrogen content, meaning of a N-containing compound, in particular for the improved uptake and/or assimilation of nitrogen. Accordingly, in one embodiment, the process of the present invention comprises the use of said “glucose-6-phosphate dehydrogenase” or its homolog, preferably in plastids, e.g. as shown herein, for the production of nitrogen or nitrogen containing compounds and/or for conferring an enhanced nitrogen assimilation, accumulation and/or utilization and/or a increased total nitrogen content, meaning of a N-containing compound, in particular for the increased uptake and/or utilization and/or assimilation of nitrogen under nitrogen limited conditions.

[0053] The sequence of b1852 (Accession number NP_{—}416366) from Escherichia coli has been published in Blattner et al., Science 277 (5331), 1453-1474 (1997), and its activity is being defined as “glucose-6-phosphate dehydrogenase”. Accordingly, in one embodiment, the process of the present invention comprises the use of a “glucose-6-phosphate dehydrogenase” or its homolog, preferably in plastids, e.g. as shown herein, for the production of nitrogen or nitrogen containing compounds and/or for conferring an enhanced nitrogen assimilation, accumulation and/or utilization and/or a increased total nitrogen content, meaning of a N-containing compound, in particular for increasing the amount of a N-containing compound in an organism or a part thereof, as mentioned.

[0054] Accordingly, in one embodiment, the process of the present invention comprises the use of a “glucose-6-phosphate dehydrogenase” or its homolog, preferably in plastids, e.g. as shown herein, for the production of nitrogen or nitrogen containing compounds and/or for conferring an enhanced nitrogen assimilation, accumulation and/or utilization and/or a increased total nitrogen content, meaning of a N-containing compound, in for the improved uptake and/or assimilation of nitrogen.

[0055] Accordingly, in one embodiment, the process of the present invention comprises the use of a “glucose-6-phosphate dehydrogenase” or its homolog, preferably in plastids, e.g. as shown herein, for the production of nitrogen or nitrogen containing compounds and/or for conferring an enhanced nitrogen assimilation, accumulation and/or utilization and/or a increased total nitrogen content, meaning of a N-containing compound, in particular for the increased uptake and/or utilization and/or assimilation of nitrogen under nitrogen limited conditions.

[0056] The sequence of YJL167W (Accession number NP_{—}012368.1) from Saccharomyces cerevisiae has been published in Goffeau et al., Science 274 (5287), 546-547, 1996 and Anderson et al., J. Biol. Chem. 264, 19176-19184 (1989), and its activity is being defined as “farnesyl pyrophosphate synthetase (FPP synthase)”. Accordingly, in one embodiment, the process of the present invention comprises the use of said “farnesyl pyrophosphate synthetase (FPP synthase)” or its homolog, preferably in plastids, e.g. as shown herein, for the production of nitrogen or nitrogen containing compounds and/or for conferring an enhanced nitrogen assimilation, accumulation and/or utilization and/or a increased total nitrogen content, meaning of a N-containing compound, in particular for increasing the amount of a N-containing compound in an organism or a part thereof, as mentioned.

[0057] Accordingly, in one embodiment, the process of the present invention comprises the use of said “farnesyl pyrophosphate synthetase (FPP synthase)” or its homolog, preferably in plastids, e.g. as shown herein, for the production of nitrogen or nitrogen containing compounds and/or for conferring an enhanced nitrogen assimilation, accumulation and/or utilization and/or a increased total nitrogen content, meaning of a N-containing compound, in particular for the improved uptake and/or assimilation of nitrogen.

[0058] Accordingly, in one embodiment, the process of the present invention comprises the use of said “farnesyl pyrophosphate synthetase (FPP synthase)” or its homolog, preferably in plastids, e.g. as shown herein, for the production of nitrogen or nitrogen containing compounds and/or for conferring an enhanced nitrogen assimilation, accumulation and/or utilization and/or a increased total nitrogen content, meaning of a N-containing compound, in particular for the increased uptake and/or utilization and/or assimilation of nitrogen under nitrogen limited conditions.

[0059] The sequence of YML045C (Accession number NP_{—}013658.1) from Saccharomyces cerevisiae has been published in Goffeau et al., Science 274 (5287), 546-547,1996 and Guiard et al., EMBO J. 4, 3265-3272 (1985), and its activity is being defined as “L-lactate cytochrome c oxidoreductase/cytochrome b2”. Accordingly, in one embodiment, the process of the present invention comprises the use of said “L-lactate cytochrome c oxidoreductase/cytochrome b2” or its homolog, preferably in plastids, e.g. as shown herein, for the production of nitrogen or nitrogen containing compounds and/or for conferring an enhanced nitrogen assimilation, accumulation and/or utilization and/or a increased total nitrogen content, meaning of a N-containing compound, in particular for increasing the amount of a N-containing compound in an organism or a part thereof, as mentioned.

[0060] Accordingly, in one embodiment, the process of the present invention comprises the use of said “L-lactate cytochrome c oxidoreductase/cytochrome b2” or its homolog, preferably in plastids, e.g. as shown herein, for the production of nitrogen or nitrogen containing compounds and/or for conferring an enhanced nitrogen assimilation, accumulation and/or utilization and/or a increased total nitrogen content, meaning of a N-containing compound, in particular for the improved uptake and/or assimilation of nitrogen.

[0061] Accordingly, in one embodiment, the process of the present invention comprises the use of said “L-lactate cytochrome c oxidoreductase/cytochrome b2” or its homolog, preferably in plastids, e.g. as shown herein, for the production of nitrogen or nitrogen containing compounds and/or for conferring an enhanced nitrogen assimilation, accumulation and/or utilization and/or a increased total nitrogen content, meaning of a N-containing compound, in particular for the increased uptake and/or utilization and/or assimilation of nitrogen under nitrogen limited conditions.

[0062] Homologues (=homologs) of the present gene products can be derived from any organisms as long as the homologue confers the herein mentioned activity, in particular, confers an increase in nitrogen or nitrogen containing compounds amount or content. Further, in the present invention, the term “homologue” relates to the sequence of an organism having the highest sequence homology to the herein mentioned or listed sequences of all expressed sequences of said organism. However, the person skilled in the art knows, that, preferably, the homologue has said nitrogen content-increasing activity and, if known, the same biological function or activity in the organism as at least one of the protein(s) selected from the group as indicated in Table I, Column 3, application no. 1 and/or application no. 2 and/or application no. 3, e.g. having the sequence of a polypeptide encoded by a nucleic acid molecule comprising the sequence indicated in indicated in Table I, Column 5 or 7, application no. 1 and/or application no. 2 and/or application no. 3.

[0063] In one embodiment, the homolog of any one of the polypeptides indicated in Table II, lines 1 or 3 or 4 or 5 is a homolog having the same or a similar activity, in particular an increase of activity confers an increase in the content of nitrogen or nitrogen containing compounds nitrogen or nitrogen containing compounds in the organisms and being derived from an Eukaryot. In one embodiment, the homolog of a polypeptide indicated in Table II, column 3, line 2 is a homolog having the same or a similar activity, in particular an increase of activity confers an increase in the nitrogen content nitrogen or nitrogen containing compounds in the organisms or part thereof, and being derived from bacteria. In one embodiment, the homolog of a polypeptide indicated in Table II, column 3, lines 1 or 3 or 4 or 5 is a homolog having the same or a similar activity, in particular an increase of activity confers an increase in the content of nitrogen or nitrogen containing compounds in an organisms or part thereof, and being derived from Fungi.

[0064] In one embodiment, the homolog of a polypeptide indicated in Table II, column 3, line 2 is a homolog having the same or a similar activity, in particular an increase of activity confers an increase in the content of nitrogen or nitrogen containing compounds in the organisms or part thereof and being derived from Proteobacteria.

[0065] In one embodiment, the homolog of a polypeptide indicated in Table II, column 3, lines 1 or 3 or 4 or 5 is a homolog having the same or a similar activity, in particular an increase of activity confers an increase in the content of nitrogen or nitrogen containing compounds nitrogen or nitrogen containing compounds in the organisms or a part thereof and being derived from Ascomycota.

[0066] In one embodiment, the homolog of a polypeptide indicated in Table II, column 3, line 2 is a homolog having the same or a similar activity, in particular an increase of activity confers an increase in the content nitrogen or nitrogen containing compounds nitrogen or nitrogen containing compounds in the organisms or part thereof, and being derived from Gammaproteobacteria.

[0067] In one embodiment, the homolog of a polypeptide indicated in Table II, column 3, lines 1 or 3 or 4 or 5 is a homolog having the same or a similar activity, in particular an increase of activity confers an increase in the content of nitrogen or nitrogen containing compounds nitrogen or nitrogen containing compounds in the organisms or part thereof, and being derived from Saccharomycotina.

[0068] In one embodiment, the homolog of a polypeptide indicated in Table II, column 3, line 2 is a homolog having the same or a similar activity, in particular an increase of activity confers an increase in the content of nitrogen or nitrogen containing compounds nitrogen or nitrogen containing compounds in the organisms or part thereof, and being derived from Enterobacteriales.

[0069] In one embodiment, the homolog of a polypeptide indicated in Table II, column 3, lines 1 or 3 or 4 or 5 is a homolog having the same or a similar activity, in particular an increase of activity confers an increase in the content of nitrogen or nitrogen containing compounds nitrogen or nitrogen containing compounds in the organisms or a part thereof, and being derived from Saccharomycetes.

[0070] In one embodiment, the homolog of the a polypeptide indicated in Table II, column 3, line 2 is a homolog having the same or a similar activity, in particular an increase of activity confers an increase in the content of nitrogen or nitrogen containing compounds nitrogen or nitrogen containing compounds in the organisms or part thereof, and being derived from Enterobacteriaceae.

[0071] In one embodiment, the homolog of a polypeptide indicated in Table II, column 3, lines 1 or 3 or 4 or 5 is a homolog having the same or a similar activity, in particular an increase of activity confers an increase in the content of nitrogen or nitrogen containing compounds nitrogen or nitrogen containing compounds in the organisms, and being derived from Saccharomycetales.

[0072] In one embodiment, the homolog of a polypeptide indicated in Table II, column 3, line 2 is a homolog having the same or a similar activity, in particular an increase of activity confers an increase in the content of nitrogen or nitrogen containing compounds nitrogen or nitrogen containing compounds in the organisms or a part thereof, and being derived from Escherichia.

[0073] In one embodiment, the homolog of a polypeptide indicated in Table II, column 3, lines 1 or 3 or 4 or 5 is a homolog having the same or a similar activity, in particular an increase of activity confers an increase in the content of nitrogen or nitrogen containing compounds nitrogen or nitrogen containing compounds in the organisms or a part thereof, and being derived from Saccharomycetaceae.

[0074] In one embodiment, the homolog of a polypeptide indicated in Table II, column 3, line 1 or 3 or 4 or 5 is a homolog having the same or a similar activity, in particular an increase of activity confers an increase in the content of nitrogen or nitrogen containing compounds nitrogen or nitrogen containing compounds in the organisms or a part thereof, and being derived from Saccharomycetes.

[0075] Homologs of the polypeptides indicated in Table II, column 3, application no. 1 and/or application no. 2 and/or application no. 3, may be the polypeptides encoded by the nucleic acid molecules polypeptide indicated in Table I, column 7, application no. 1 and/or application no. 2 and/or application no. 3 or may be the polypeptides indicated in Table II, column 7, application no. 1 and/or application no. 2 and/or application no. 3.

[0076] Further homologs of are described herein below.

[0077] In accordance with the invention, a protein or polypeptide has the “activity of an protein of the invention”, or of a protein as used in the invention, e.g. a protein having the activity of a protein indicated in Table II, column 3, application no. 1 if its de novo activity, or its increased expression directly or indirectly leads to an increased total nitrogen content, preferably of N-containing compounds, preferably amino acids, more preferably phenylalanine, proline, aspartic acid, 5-oxoproline, and/or alanine level in the organism or a part thereof, preferably in a cell of said organism.

[0078] In one embodiment of the present invention the expression of a protein having the activity of a protein indicated in Table II, column 3, application no. 1 has the activity of an protein of the invention if its de novo activity, or its increased expression directly or indirectly leads to an increased total nitrogen content, preferably of N-containing compounds, preferably amino acids, more preferably phenylalanine, proline level in leaves of a plant and of aspartic acid, 5-oxoproline, and/or alanine level preferably in the seeds of a plant.

[0079] In accordance with the invention, a protein or polypeptide has the “activity of an protein of the invention”, or of a protein as used in the invention, e.g. a protein having the activity of a protein indicated in Table II, column 3, application no. 2, line 2 if its de novo activity, or its increased activity directly or indirectly leads to an increased total nitrogen content, preferably of N-containing compounds, preferably amino acids, more preferably proline level in the organism or a part thereof, preferably in a cell of said organism.

[0080] In one embodiment of the present invention the expression of a protein having the activity of a protein indicated in Table II, column 3, application no. 2, line 2 has the activity of an protein of the invention if its de novo activity, or its increased directly or indirectly leads to an increased total nitrogen content, preferably of N-containing compounds, preferably amino acids, more preferably proline level in leaves a plant.

[0081] In accordance with the invention, a protein or polypeptide has the “activity of an protein of the invention”, or of a protein as used in the invention, e.g. a protein having the activity of a protein indicated in Table II, column 3, application no. 2, line 3 if its de novo activity, or its increased expression directly or indirectly leads to an increased total nitrogen content, preferably of N-containing compounds, preferably amino acids, more preferably tyrosine, tryptophane, isoleucine, arginine, threonine, valine and/or alanine level in the organism or a part thereof, preferably in a cell of said organism.

[0082] In one embodiment of the present invention the expression of a protein having the activity of a protein indicated in Table II, column 3, application no. 2, line 3 has the activity of an protein of the invention if its de novo activity, or its increased activity directly or indirectly leads to an increased total nitrogen content, preferably of N-containing compounds, preferably amino acids, more preferably tyrosine, tryptophane, isoleucine, arginine, threonine, valine and/or alanine level in leaves a plant and/or alanine in the seeds of a plant.

[0083] In a preferred embodiment, the protein or polypeptide has the above-mentioned additional activities of a protein selected from the group as indicated in Table II, column 3, application no. 1 and/or application no. 2 and/or application no. 3, preferably application no. 1. During the specification the activity or preferably the biological activity of such a protein or polypeptide or an nucleic acid molecule or sequence encoding such protein or polypeptide is identical or similar if it still has the biological or enzymatic activity of any one of the proteins selected from the group as indicated in Table II, column 3, application no. 1 and/or application no. 2 and/or application no. 3, preferably application no. 1, i.e. if it has at least 10% of the original enzymatic activity, preferably 20%, particularly preferably 30%, most particularly preferably 40% in comparison to an any one of the proteins indicated in Table II, column 3, application no. 1 and/or application no. 2 and/or application no. 3, preferably application no. 1.

[0084] In one embodiment, the polypeptide of the invention or the polypeptide used in the method of the invention confers said activity, e.g. the increase of nitrogen or nitrogen containing compounds and/or the enhanced nitrogen assimilation, accumulation and/or utilization and/or for the increased total nitrogen content in an organism or a part thereof, if it is derived from an organism, which is evolutionary distant to the organism in which it is expressed. For example origin and expressing organism are derived from different families, orders, classes or phylums.

[0085] In one embodiment, the polypeptide of the invention or the polypeptide used in the method of the invention confers said activity, e.g. the increase of nitrogen or nitrogen containing compounds, and/or the enhanced nitrogen assimilation, accumulation and/or utilization and/or for the increased total nitrogen content in an organism or a part thereof, if it is derived from an organism, which is evolutionary close to the organism indicated in Table I, column 4 and is expressed in an organism, which is evolutionary distant to the origin organism. For example origin and expressing organism are derived from different families, orders, classes or phylums whereas origin and the organism indicated in Table I, column 4 are derived from the same families, orders, classes or phylums.

[0086] The terms “increased”, “rose”, “extended”, “enhanced”, “improved” or “amplified” relate to a corresponding change of a property in an organism, a part of an organism such as a tissue, seed, root, leave, flower etc. or in a cell and are interchangeable. Preferably, the overall activity in the volume is increased or enhanced in cases if the increase or enhancement is related to the increase or enhancement of an activity of a gene product, independent whether the amount of gene product or the specific activity of the gene product or both is increased or enhanced or whether the amount, stability or translation efficacy of the nucleic acid sequence or gene encoding for the gene product is increased or enhanced. The terms “reduction”, “decrease” or “deletion” relate to a corresponding change of a property in an organism, a part of an organism such as a tissue, seed, root, leave, flower etc. or in a cell. Preferably, the overall activity in the volume is reduced, decreased or deleted in cases if the reduction, decrease or deletion is related to the reduction, decrease or deletion of an activity of a gene product, independent whether the amount of gene product or the specific activity of the gene product or both is reduced, decreased or deleted or whether the amount, stability or translation efficacy of the nucleic acid sequence or gene encoding for the gene product is reduced, decreased or deleted.

[0087] The terms “increase” or “decrease” relate to a corresponding change of a property an organism or in a part of an organism, such as a tissue, seed, root, leave, flower etc. or in a cell. Preferably, the overall activity in the volume is increased in cases the increase relates to the increase of an activity of a gene product, independent whether the amount of gene product or the specific activity of the gene product or both is increased or generated or whether the amount, stability or translation efficacy of the nucleic acid sequence or gene encoding for the gene product is increased.

[0088] Under “change of a property” it is understood that the activity, expression level or amount of a gene product or the metabolite content or the element content is changed in a specific volume relative to a corresponding volume of a control, reference or wild type, including the de novo creation of the activity or expression.

[0089] The terms “increase” or “decrease” include the change or the modulation of said property in only parts of the subject of the present invention, for example, the modification can be found in compartment of a cell, like a organelle, or in a part of a plant, like tissue, seed, root, leave, flower etc. but is not detectable if the overall subject, i.e. complete cell or plant, is tested. Preferably, the increase or decrease is found cellular, thus the term “increase of an activity” or “increase of a metabolite or element content” relates to the cellular increase compared to the wild type cell.

[0090] However, the terms increase or decrease as used herein also includes the change or modulation of a property in the whole organism as mentioned.

[0091] Accordingly, the term “increase” or “decrease” means that the specific activity of an enzyme, preferably the amount of a compound or metabolite, e.g. of a polypeptide, a nucleic acid molecule or of nitrogen or nitrogen containing compounds of the invention or an encoding mRNA or DNA, can be increased or decreased in a volume.

[0092] The terms “wild type”, “control” or “reference” are exchangeable and can be a cell or a part of organisms such as an organelle or a tissue, or an organism, in particular a microorganism or a plant, which was not modified or treated according to the herein described process according to the invention. Accordingly, the cell or a part of organisms such as an organelle or a tissue, or an organism, in particular a microorganism or a plant used as wild type, control or reference corresponds to the cell, organism or part thereof as much as possible and is in any other property but in the result of the process of the invention as identical to the subject matter of the invention as possible. Thus, the wild type, control, or reference is treated identically or as identical as possible, saying that only conditions or properties might be different which do not influence the quality of the tested property.

[0093] Preferably, any comparison is carried out under analogous conditions. The term “analogous conditions” means that all conditions such as, for example, culture or growing conditions, assay conditions (such as buffer composition, temperature, substrates, pathogen strain, concentrations and the like) are kept identical between the experiments to be compared.

[0094] The “reference”, “control”, or “wild type” is preferably a subject, e.g. an organelle, a cell, a tissue, an organism, in particular a plant or a microorganism, which was not modified or treated according to the herein described process of the invention and is in any other property as similar to the subject matter of the invention as possible. The reference, control, or wild type is in its genome, transcriptome, proteome or meta-bolome as similar as possible to the subject of the present invention. Preferably, the term “reference-” “control-” or “wild type-”-organelle, -cell, -tissue or -organism, in particular plant or microorganism, relates to an organelle, cell, tissue or organism, in particular plant or microorganism, which is nearly genetically identical to the organelle, cell, tissue or organism, in particular microorganism or plant, of the present invention or a part thereof preferably 95%, more preferred are 98%, even more preferred are 99.00%, in particular 99,10%, 99,30%, 99,50%, 99,70%, 99,90%, 99,99%, 99, 999% or more. Most preferable the “reference”, “control”, or “wild type” is a subject, e.g. an organelle, a cell, a tissue, an organism, which is genetically identical to the organism, cell or organelle used according to the process of the invention except that the responsible or activity conferring nucleic acid molecules or the gene product encoded by them are amended, manipulated, exchanged or introduced according to the inventive process.

[0095] Preferably, the reference, control or wild type differs form the subject of the present invention only in the cellular activity of the polypeptide of the invention or the polypeptide used in the method of the invention, e.g. as result of an increase in the level of the nucleic acid molecule of the present invention or an increase of the specific activity of the polypeptide of the invention or the polypeptide used in the method of the invention. E.g., it differs by or in the expression level or activity of an protein having the activity of a protein selected from the group as as indicated in Table II, column 3, application no. 1 and/or application no. 2 and/or application no. 3, preferably application no. 1, or being encoded by a nucleic acid molecule indicated in Table I, column 5, application no. 1 and/or application no. 2, preferably application no. 1, or its homologs, e.g. as indicated in Table I, column 7, application no. 1 and/or application no. 2 and/or application no. 3, preferably application no. 1, its biochemical or genetical causes and therefore shows the increased amount of nitrogen or nitrogen containing compounds, the enhanced nitrogen assimilation, accumulation and/or utilization and/or the increased total nitrogen content.

[0096] In case, a control, reference or wild type differing from the subject of the present invention only by not being subject of the process of the invention can not be provided, a control, reference or wild type can be an organism in which the cause for the modulation of an activity conferring the increase of nitrogen or nitrogen containing compounds nitrogen or nitrogen containing compounds or expression of the nucleic acid molecule as described herein has been switched back or off, e.g. by knocking out the expression of responsible gene product, e.g. by antisense inhibition, by inactivation of an activator or agonist, by activation of an inhibitor or antagonist, by inhibition through adding inhibitory antibodies, by adding active compounds as e.g. hormones, by introducing negative dominant mutants, etc. A gene production can for example be knocked out by introducing inactivating point mutations, which lead to an enzymatic or biological activity inhibition or a destabilization or an inhibition of the ability to bind to cofactors etc.

[0097] Accordingly, preferred reference subject is the starting subject of the present process of the invention. Preferably, the reference and the subject matter of the invention are compared after standardization and normalization, e.g. to the amount of total RNA, DNA, or Protein or activity or expression of reference genes, like housekeeping genes, such as ubiquitin, actin or ribosomal proteins.

[0098] A series of mechanisms exists via which a modification of a protein, e.g. the polypeptide of the invention or the polypeptide used in the method of the invention can directly or indirectly affect the uptake or assimilation of nitrogen or the yield, production and/or production efficiency of nitrogen containing compounds.

[0099] For example, the molecule number or the specific activity of the polypeptide or the nucleic acid molecule may be increased. Larger amounts of nitrogen can be assimilated or taken up or in case of nitrogen containing compounds produced if the polypeptide or the nucleic acid of the invention is expressed de novo in an organism lacking the activity of said protein. However, it is also possible to increase the expression of the gene which is naturally present in the organisms, for example by amplifying the number of gene(s), by modifying the regulation of the gene, or by increasing the stability of the corresponding mRNA or of the corresponding gene product encoded by the nucleic acid molecule of the invention or the nucleic acid molecule used in the method of the invention, or by introducing homologous genes from other organisms which are differently regulated, e.g. not feedback sensitive.

[0100] The increase, decrease or modulation according to this invention can be constitutive, e.g. due to a stable permanent transgenic expression or to a stable mutation in the corresponding endogenous gene encoding the nucleic acid molecule of the invention or the nucleic acid molecule used in the method of the invention or to a modulation of the expression or of the behaviour of a gene conferring the expression of the polypeptide of the invention or the polypeptide used in the method of the invention, or transient, e.g. due to an transient transformation or temporary addition of a modulator such as a agonist or antagonist or inducible, e.g. after transformation with an inducible construct carrying the nucleic acid molecule of the invention or the nucleic acid molecule used in the method of the invention under control of a inducible promoter and adding the inducer, e.g. tetracycline or as described herein below.

[0101] The increase in activity of the polypeptide amounts in a cell, a tissue, a organelle, an organ or an organism or a part thereof preferably to at least 5%, preferably to at least 20% or at to least 50%, especially preferably to at least 70%, 80%, 90% or more, very especially preferably are to at least 200%, most preferably are to at least 500% or more in comparison to the control, reference or wild type.

[0102] The specific activity of a polypeptide encoded by a nucleic acid molecule of the present invention or of the polypeptide of the present invention can be tested as described in the examples. In particular, the expression of a protein in question in a cell, e.g. a plant cell or a microorganism and the detection of an increase in nitrogen or nitrogen containing compounds level in comparison to a control is an easy test and can be performed as described in the state of the art.

[0103] The term “increase” includes, that a compound or an activity is introduced into a cell de novo or that the compound or the activity has not been detectable before, in other words it is “generated”.

[0104] Accordingly, in the following, the term “increasing” also comprises the term “generating” or “stimulating”. The increased activity manifests itself in an increased amount of nitrogen or nitrogen containing compounds.

[0105] In one embodiment, in case the activity of the Saccharomyces cerevisiae protein YPR138c or its homologs, e.g. as indicated in Table II, columns 5 or 7, application no. 1, line 1, is increased; preferably, an increase of nitrogen or nitrogen containing compounds between 17% and 24% or more is conferred, preferably an increase of protein or amino acid content in a plant between 17% and 24% or more is conferred. Preferably this increase in conferred in plant seeds or fruits.

[0106] In one embodiment, in case the activity of the Saccharomyces cerevisiae protein YPR138c or its homologs is increased, preferably, an increase of nitrogen or nitrogen containing compounds and of coenzyme Q10, fumaric acid, malic acid and/or lignoceric acid in leaves and/or glycerol-3-phosphate, benzoic acid, hydroxyl-benzoic acid and/or dodecanol in seeds of a plant is conferred.

[0107] In one embodiment, in case the activity of the Saccharomyces cerevisiae protein YNL241C or its homologs, e.g. as indicated in Table II, columns 5 or 7, application no. 2, line 3, is increased, preferably in a cellular compartment, preferably in the plastids, preferably, an increase of nitrogen or nitrogen containing compounds between 10% and 15% or more, preferably of 12% or more is conferred, preferably an increase of amino acid content in a plant between 10% and 15% or more, preferably of 12% or more is conferred. Preferably this increase in conferred in plant seeds or fruits.

[0108] In one embodiment, in case the activity of the Echerichia coli protein b1852 or its homologs, e.g. as indicated in Table II, columns 5 or 7, application no. 2, line 2, is increased, preferably in a cellular compartment, preferably in the plastids, preferably, an increase of nitrogen or nitrogen containing compounds between 10% and 15% or more, preferably of 13% or more is conferred, preferably an increase of amino acid content in a plant between 10% and 15% or more, preferably of 13% or more is conferred preferably in the seeds.

[0109] In one embodiment, in case the activity of the Saccharomyces cerevisiae protein YJL167W or its homologs, e.g. as indicated in Table II, columns 5 or 7, application no. 3, line 4, is increased, preferably in a cellular compartment, preferably in the plastids, preferably, an increase of nitrogen or nitrogen containing compounds between 5% and 30% or more, preferably between 8% and 26% or more is conferred preferably in the seeds.

[0110] In one embodiment, in case the activity of the Saccharomyces cerevisiae protein YML054C or its homologs, e.g. as indicated in Table II, columns 5 or 7, application no. 3, line 5, is increased, preferably in a cellular compartment, preferably in the plastids, preferably, an increase of nitrogen or nitrogen containing compounds between 5% and 20% or more, preferably of between 6% and 15% or more is conferred preferably in the seeds.

[0111] A protein having an activity conferring an increase in the amount or level of nitrogen or nitrogen containing compounds and/or enhanced nitrogen assimilation, accumulation and/or utilization and/or the increased total nitrogen content preferably has the structure of the polypeptide described herein, in particular of a polypeptides comprising a consensus sequence selected from the group as indicated in Table IV, columns 7, application no. 1 and/or application no. 2 and/or application no. 3, preferably application no. 1 or of a polypeptide selected from the group as indicated in Table II, columns 5 or 7, application no. 1 and/or application no. 2 and/or application no. 3, preferably application no. 1 or the functional homologues thereof as described herein, or of a polypeptide which is encoded by the nucleic acid molecule characterized herein or the nucleic acid molecule according to the invention, for example by a nucleic acid molecule as indicated in Table I, columns 5 or 7, application no. 1 and/or application no. 2 and/or application no. 3, preferably application no. 1 or its herein described functional homologues and has the herein mentioned activity.

[0112] Owing to the biological activity of the proteins which are used in the process according to the invention and which are encoded by nucleic acid molecules according to the invention, it is possible to produce compositions comprising nitrogen or nitrogen containing compounds. Depending on the choice of the organism used for the process according to the present invention, for example a microorganism or a plant, compositions or mixtures of various nitrogen containing compounds, e.g. comprising further distinct amino acids, fatty acids, vitamins, hormones, sugars, lipids, etc. can be produced.

[0113] The term “expression” refers to the transcription and/or translation of a codogenic gene segment or gene. As a rule, the resulting product is an mRNA or a protein. However, expression products can also include functional RNAs such as, for example, antisense, nucleic acids, tRNAs, snRNAs, rRNAs, RNAi, siRNA, ribozymes etc. Expression may be systemic, local or temporal, for example limited to certain cell types, tissues organs or time periods.

[0114] In one embodiment, the process of the present invention comprises one or more of the following steps:
[0115] a) stabilizing a protein conferring the increased expression of a protein encoded by the nucleic acid molecule of the invention or of the polypeptide of the invention or the nucleic acid molecule or the polypeptide used in the method of the invention, e.g. of a polypeptide having an activity of a protein selected from the group as indicated in Table II, column 3, or its homologs activity, e.g. as indicated in Table II, columns 5 or 7, having herein-mentioned-increasing activity;
[0116] b) stabilizing a mRNA conferring the increased expression of a protein encoded by the nucleic acid molecule of the invention or the nucleic acid molecule used in the method of the invention, e.g. of a polypeptide having an activity of a protein selected from the group as indicated in Table II, column 3 or its homologs activity, e.g. as indicated in Table II, columns 5 or 7, or of a mRNA encoding the polypeptide of the present invention having herein-mentioned-increasing activity;
[0117] c) increasing the specific activity of a protein conferring the increased expression of a protein encoded by the nucleic acid molecule of the invention or of the polypeptide of the present invention or the nucleic acid molecule or polypeptide used in the method of the invention, having herein-mentioned-increasing activity, e.g. of a polypeptide having an activity of a protein selected from the group as indicated in Table II, column 3, or its homologs activity, e.g. as indicated in Table II, columns 5 or 7, or decreasing the inhibitory regulation of the polypeptide of the invention or the polypeptide used in the method of the invention;
[0118] d) generating or increasing the expression of an endogenous or artificial transcription factor mediating the expression of a protein conferring the increased expression of a protein encoded by the nucleic acid molecule of the invention or the nucleic acid molecule used in the method of the invention or of the polypeptide of the invention or the polypeptide used in the method of the invention having herein-mentioned-increasing activity, e.g. of a polypeptide having an activity of a protein selected from the group as indicated in Table II, column 3, or its homologs activity, e.g. as indicated in Table II, columns 5 or 7;
[0119] e) stimulating activity of a protein conferring the increased expression of a protein encoded by the nucleic acid molecule of the present invention or a polypeptide of the present invention having herein-mentioned-increasing activity, e.g. of a polypeptide having an activity of a protein selected from the group as indicated in Table II, column 3, or its homologs activity, e.g. as indicated in Table II, columns 5 or 7, by adding one or more exogenous inducing factors to the organism or parts thereof;
[0120] f) expressing a transgenic gene encoding a protein conferring the increased expression of a polypeptide encoded by the nucleic acid molecule of the present invention or a polypeptide of the present invention, having herein-mentioned-increasing activity, e.g. of a polypeptide having an activity of a protein selected from the group as indicated in Table II, column 3, or its homologs activity, e.g. as indicated in Table II, columns 5 or 7;
[0121] g) increasing the copy number of a gene conferring the increased expression of a nucleic acid molecule encoding a polypeptide encoded by the nucleic acid molecule of the invention or the nucleic acid molecule used in the method of the invention or the polypeptide of the invention or the polypeptide used in the method of the invention having herein-mentioned—increasing activity, e.g. of a polypeptide having an activity of a protein selected from the group as indicated in Table II, column 3, or its homologs activity, e.g. as indicated in Table II, columns 5 or 7;
[0122] h) Increasing the expression of the endogenous gene encoding the polypeptide of the invention or the polypeptide used in the method of the invention, e.g. a polypeptide having an activity of a protein selected from the group as indicated in Table II, column 3, or its homologs activity, e.g. selected from the group as indicated in Table II, columns 5 or 7, by adding positive expression or removing negative expression elements, e.g. homologous recombination can be used to either introduce positive regulatory elements like for plants the 35S enhancer into the promoter or to remove repressor elements form regulatory regions. Further gene conversion methods can be used to disrupt repressor elements or to enhance to activity of positive elements. Positive elements can be randomly introduced in plants by T-DNA or transposon mutagenesis and lines can be identified in which the positive elements have be integrated near to a gene of the invention, the expression of which is thereby enhanced;
[0123] i) Modulating growth conditions of an organism in such a manner, that the expression or activity of the gene encoding the protein of the invention or the protein itself is enhanced for example microorganisms or plants can be grown under a higher temperature regime leading to an enhanced expression of heat shock proteins, e.g. the heat shock protein of the invention, which can lead an enhanced the fine chemical production; and/or
[0124] j) selecting of organisms with especially high activity of the proteins of the invention from natural or from mutagenized resources and breeding them into the target organisms, e.g. the elite crops.

[0125] Preferably, said mRNA is the nucleic acid molecule of the present invention and/or the protein conferring the increased expression of a protein encoded by the nucleic acid molecule of the present invention or the polypeptide having the herein mentioned activity is the polypeptide of the present invention, e.g. conferring the increase of N-containing compound after increasing the expression or activity of the encoded polypeptide or having the activity of a polypeptide having an activity of a protein selected from the group as indicated in Table II, column 3, or its homologs activity, e.g. as indicated in Table II, columns 5 or 7.

[0126] In general, the amount of mRNA or polypeptide in a cell or a compartment of a organism correlates with the amount of encoded protein and thus with the overall activity of the encoded protein in said volume. Said correlation is not always linear, the activity in the volume is dependent on the stability of the molecules or the presence of activating or inhibiting co-factors. Further, product and educt inhibitions of enzymes are well known and described in Textbooks, e.g. Stryer, Biochemistry.

[0127] In general, the amount of mRNA, polynucleotide or nucleic acid molecule in a cell or a compartment of an organism correlates with the amount of encoded protein and thus with the overall activity of the encoded protein in said volume. Said correlation is not always linear, the activity in the volume is dependent on the stability of the molecules, the degradation of the molecules or the presence of activating or inhibiting co-factors. Further, product and educt inhibitions of enzymes are well known, e.g. Zinser et al. “Enzyminhibitoren”/Enzyme inhibitors”.

[0128] The activity of the abovementioned proteins and/or polypeptide encoded by the nucleic acid molecule of the present invention can be increased in various ways. For example, the activity in an organism or in a part thereof, like a cell or a organelle, is increased via increasing the gene product number, e.g. by increasing the expression rate, like introducing a stronger promoter, or by increasing the stability of the mRNA expressed, thus increasing the translation rate, and/or increasing the stability of the gene product, thus reducing the proteins decayed. Further, the activity or turnover of enzymes can be influenced in such a way that a reduction or increase of the reaction rate or a modification (reduction or increase) of the affinity to the substrate results, is reached. A mutation in the catalytic centre of an polypeptide of the invention or the polypeptide used in the method of the invention, e.g. as enzyme, can modulate the turn over rate of the enzyme, e.g. a knock out of an essential amino acid can lead to a reduced or completely knock out activity of the enzyme, or the deletion or mutation of regulator binding sites can reduce a negative regulation like a feedback inhibition (or a substrate inhibition, if the substrate level is also increased). The specific activity of an enzyme of the present invention can be increased such that the turn over rate is increased or the binding of a co-factor is improved. Improving the stability of the encoding mRNA or the protein can also increase the activity of a gene product. The stimulation of the activity is also under the scope of the term “increased activity”.

[0129] Moreover, the regulation of the abovementioned nucleic acid sequences may be modified so that gene expression is increased. This can be achieved advantageously by means of heterologous regulatory sequences or by modifying, for example mutating, the natural regulatory sequences which are present. The advantageous methods may also be combined with each other.

[0130] In general, an activity of a gene product in an organism or part thereof, in particular in a plant cell, a plant, or a plant tissue, a part thereof or a organelle or in a microorganism can be increased by increasing the amount of the specific encoding mRNA or the corresponding protein in said organism or part thereof. “Amount of protein or mRNA” is understood as meaning the molecule number of polypeptides or mRNA molecules in an organism, a tissue, a cell, or a cell compartment. “Increase” in the amount of a protein means the quantitative increase of the molecule number of said protein in an organism, a tissue, a cell or a cell compartment or part thereof—for example by one of the methods described herein below—in comparison to a wild type, control or reference.

[0131] The increase in molecule number amounts preferably to at least 1%, preferably to more than 10%, more preferably to 30% or more, especially preferably to 50%, 70% or more, very especially preferably to 100%, most preferably to 500% or more. However, a de novo expression is also regarded as subject of the present invention.

[0132] A modification, i.e. an increase or decrease, can be caused by endogenous or exogenous factors. For example, an increase in activity in an organism or a part thereof can be caused by adding a gene product or a precursor or an activator or an agonist to the media or nutrition or can be caused by introducing said subjects into a organism, transient or stable.

[0133] In one embodiment the increase in the amount of nitrogen or nitrogen containing compounds in the organism or a part thereof, e.g. in a cell, a tissue, a organ, an organelle etc., is achieved by increasing the endogenous level of the polypeptide of the invention or the polypeptide used in the method of the invention in the cytosol or in a compartment like the plastids. Accordingly, in an embodiment of the present invention, the present invention relates to a process wherein the gene copy number of a gene encoding the polynucleotide or nucleic acid molecule of the invention or the nucleic acid molecule used in the method of the invention as herein described is increased. Further, the endogenous level of the polypeptide of the invention or the polypeptide used in the method of the invention as described can for example be increased by modifying the transcriptional or translational regulation of the polypeptide.

[0134] In one embodiment the amount of nitrogen or nitrogen containing compounds in the organism or part thereof can be increase by targeted or random mutagenesis of the endogenous genes of the invention. For example homologous recombination can be used to either introduce positive regulatory elements like for plants the 35S enhancer into the promoter or to remove repressor elements form regulatory regions. In addition gene conversion like methods described by Kochevenko and Willmitzer (Plant Physiol. 2003 May; 132(1): 174-84) and citations therein can be used to disrupt repressor elements or to enhance to activity of positive regulatory elements.

[0135] Furthermore positive elements can be randomly introduced in (plant) genomes by T-DNA or transposon mutagenesis and lines can be screened for, in which the positive elements has be integrated near to a gene of the invention, the expression of which is thereby enhanced. The activation of plant genes by random integrations of enhancer elements has been described by Hayashi et al., 1992 (Science 258:1350-1353) or Weigel et al., 2000 (Plant Physiol. 122, 1003-1013) and others citied therein. Reverse genetic strategies to identify insertions (which eventually carrying the activation elements) near in genes of interest have been described for various cases e.g. Krysan et al., 1999 (Plant Cell 1999, 11, 2283-2290); Sessions et al., 2002 (Plant Cell 2002, 14, 2985-2994); Young et al., 2001, (Plant Physiol. 2001, 125, 513-518); Koprek et al., 2000 (Plant J. 2000, 24, 253-263); Jeon et al., 2000 (Plant J. 2000, 22, 561-570); Tissier et al., 1999 (Plant Cell 1999, 11, 1841-1852); Speulmann et al., 1999 (Plant Cell 1999, 11, 1853-1866). Briefly material from all plants of a large T-DNA or transposon mutagenized plant population is harvested and genomic DNA prepared. Then the genomic DNA is pooled following specific architectures as described for example in Krysan et al., 1999 (Plant Cell 1999, 11, 2283-2290). Pools of genomics DNAs are then screened by specific multiplex PCR reactions detecting the combination of the insertional mutagen (e.g. T-DNA or Transposon) and the gene of interest. Therefore PCR reactions are run on the DNA pools with specific combinations of T-DNA or transposon border primers and gene specific primers. General rules for primer design can again be taken from Krysan et al., 1999 (Plant Cell 1999, 11, 2283-2290) Rescreening of lower levels DNA pools lead to the identification of individual plants in which the gene of interest is disrupted by the insertional mutagen.

[0136] The enhancement of positive regulatory elements or the disruption or weakening of negative regulatory elements can also be achieved through common mutagenesis techniques: The production of chemically or radiation mutated populations is a common technique and known to the skilled worker. Methods for plants are described by Koorneef et al. 1982 and the citations therein and by Lightner and Caspar in “Methods in Molecular Biology” Vol 82. These techniques usually induce pointmutations that can be identified in any known gene using methods such as tilling (Colbert et al. 2001).

[0137] Accordingly, the expression level can be increased if the endogenous genes encoding a polypeptide conferring an increased expression of the polypeptide of the present invention, in particular genes comprising the nucleic acid molecule of the present invention, are modified via homologous recombination, tilling approaches or gene conversion.

[0138] Regulatory sequences can be operatively linked to the coding region of an endogenous protein and control its transcription and translation or the stability or decay of the encoding mRNA or the expressed protein. In order to modify and control the expression, promoter, UTRs, splicing sites, processing signals, polyadenylation sites, terminators, enhancers, repressors, post transcriptional or posttranslational modification sites can be changed, added or amended for example, the activation of plant genes by random integrations of enhancer elements has been described by Hayashi et al., 1992 (Science 258:1350-1353) or Weigel et al., 2000 (Plant Physiol. 122, 1003-1013) and others citied therein. For example, the expression level of the endogenous protein can be modulated by replacing the endogenous promoter with a stronger transgenic promoter or by replacing the endogenous 3′UTR with a 3′UTR, which provides more stability without amending the coding region. Further, the transcriptional regulation can be modulated by introduction of an artificial transcription factor as described in the examples. Alternative promoters, terminators and UTR are described below.

[0139] The activation of an endogenous polypeptide having above-mentioned activity, of the polypeptide of the invention or the polypeptide used in the method of the invention, e.g. conferring the increase of nitrogen or nitrogen containing compounds after increase of expression or activity in the cytsol and/or in an organelle like a plastid, can also be increased by introducing a synthetic transcription factor, which binds close to the coding region of an endogenous polypeptide of the invention or the polypeptide used in the method of the invention—or used in the process of the invention or its endogenous homolog-encoding gene whereby the synthetic transcription factor activates its transcription. A chimeric zinc finger protein can be construed, which comprises a specific DNA-binding domain and an activation domain as e.g. the VP16 domain of Herpes Simplex virus. The specific binding domain can bind to the regulatory region of the endogenous protein coding region. The expression of the chimeric transcription factor in a organism, in particular in a plant, leads to a specific expression of an endogenous polypeptide of the invention or used in the process of the invention, in particular a plant homolog thereof, see e.g. in WO01/52620, Oriz, Proc. Natl. Acad. Sci. USA, 2002, Vol. 99,13290 or Guan, Proc. Natl. Acad. Sci. USA, 2002, Vol. 99, 13296.

[0140] In one further embodiment of the process according to the invention, organisms are used in which one of the abovementioned genes, or one of the abovementioned nucleic acids, is mutated in a way that the activity of the encoded gene products is less influenced by cellular factors, or not at all, in comparison with the unmutated proteins. For example, well known regulation mechanism of enzymic activity are substrate inhibition or feed back regulation mechanisms. Ways and techniques for the introduction of substitutions, deletions and additions of one or more bases, nucleotides or amino acids of a corresponding sequence are described herein below in the corresponding paragraphs and the references listed there, e.g. in Sambrook et al., Molecular Cloning, Cold Spring Habour, NY, 1989. The person skilled in the art will be able to identify regulation domains and binding sites of regulators by comparing the sequence of the nucleic acid molecule of the present invention or the expression product thereof with the state of the art by computer software means which comprise algorithms for the identifying of binding sites and regulation domains or by introducing into a nucleic acid molecule or in a protein systematically mutations and assaying for those mutations which will lead to an increased specific activity or an increased activity per volume, in particular per cell.

[0141] It is therefore advantageously to express in an organism a nucleic acid molecule of the invention or the nucleic acid molecule used in the method of the invention or a polypeptide of the invention or the polypeptide used in the method of the invention derived from a evolutionary distantly related organism, as e.g. using a prokaryotic gene in an eukaryotic host, as in these cases the regulation mechanism of the host cell may not weaken the activity (cellular or specific) of the gene or its expression product.

[0142] %

[0143] Less influence on the regulation of a gene or its gene product is understood as meaning a reduced regulation of the enzymatic or biological activity leading to an increased specific or cellular activity of the gene or its product. An increase of the enzymatic or biological activity is understood as meaning an enzymatic or biological activity, which is increased by at least 10%, advantageously at least 20, 30 or 40%, especially advantageously by at least 50, 60 or 70% in comparison with the starting organism. This leads to an increased productivity of the desired nitrogen or nitrogen containing compounds.

[0144] Owing to the introduction of a gene or a plurality of genes conferring the expression of the nucleic acid molecule of the invention or the nucleic acid molecule used in the method of the invention or the polypeptide of the invention or the polypeptide used in the method of the invention as described below, for example the nucleic acid construct mentioned below, into an organism alone or in combination with other genes, it is possible not only to increase the biosynthetic flux towards the end product, e.g. meaning nitrogen containing compounds, but also to increase, modify or create de novo an advantageous, preferably novel metabolites composition in the organism, e.g. an advantageous amino acid composition comprising a higher content of (from a viewpoint of nutrional physiology limited) respective fine chemicals, in particular amino acids, likewise nitrogen or nitrogen containing compounds.

[0145] Preferably the composition further comprises higher amounts of metabolites positively affecting or lower amounts of metabolites negatively affecting the nutrition or health of animals or humans provided with said compositions or organisms of the invention or parts thereof. Likewise, the number or activity of further genes which are required for the import or export of nutrients or metabolites, including amino acids or its precursors, required for the cell's biosynthesis of amino acids may be increased so that the concentration of necessary or relevant precursors, cofactors or intermediates within the cell(s) or within the corresponding storage compartments is increased. Owing to the increased or novel generated activity of the polypeptide of the invention or the polypeptide used in the method of the invention or owing to the increased number of nucleic acid sequences of the invention and/or to the modulation of further genes which are involved in the biosynthesis of the amino acids, e.g. by increasing the activity of enzymes synthesizing precursors or by destroying the activity of one or more genes which are involved in the breakdown of the amino acids, it is possible to increase the yield, production and/or production efficiency of amino acids in the host organism, such as the plants or the microorganisms.

[0146] Accordingly, in one embodiment, the process according to the invention relates to a process which comprises:
[0147] a) providing a photosynthetic active organism, preferably a microorganism, a plant or a plant tissue or a plant;
[0148] b) increasing an activity of a polypeptide of the invention or the polypeptide used in the method of the invention or a homolog thereof, e.g. as indicated in Table II, columns 5 or 7, or of a polypeptide being encoded by the nucleic acid molecule of the present invention and described below, i.e. conferring an increase of nitrogen or nitrogen containing compounds in the organism, preferably in a photosynthetic active organism, preferably a microorganism, a plant or a plant tissue or a plant,
[0149] c) growing the organism, preferably a photosynthetic active organism, preferably a microorganism, a plant or a plant tissue or a plant, under conditions which permit the accumulation and/or production of nitrogen or nitrogen containing compounds respectively in the organism, preferably a photosynthetic active organism, preferably a microorganism, a plant or a plant tissue or a plant.
[0150] d) After the above-described increasing (which as defined above also encompasses the generating of an activity in an organism, i.e. a de novo activity), for example after the introduction and the expression of the nucleic acid molecules of the invention or described in the methods or processes according to the invention, the organism according to the invention, advantageously, a photosynthetic active organism, preferably a microorganism, a plant or a plant tissue or a plant, is grown and subsequently harvested.

[0151] Suitable organisms or host organisms (transgenic organism) for the nucleic acid molecule used according to the invention and for the inventive process, the nucleic acid construct or the vector (both as described below) are, in principle, all organisms which are capable of synthesizing nitrogen or nitrogen containing compounds, and which are suitable for the activation, introduction or stimulation of genes. Examples which may be mentioned are plants, microorganisms such as fungi, bacteria, yeasts, alga or diatom, transgenic or obtained by site directed mutagenesis or random mutagenesis combined with specific selection procedures. Preferred organisms are those which are naturally capable of accumulating and/or synthesizing nitrogen or nitrogen containing compounds in substantial amounts, like fungi, yeasts, bacteria or plants. In principle, transgenic animals, for example Caenorhabditis elegans, are also suitable as host organisms.

[0152] In the event that the transgenic organism is a microorganism, such as a eukaryotic organism, for example a fungus, an alga, diatom or a yeast in particular a fungus, alga, diatom or yeast selected from the families Chaetomiaceae, Choanephoraceae, Cryptococcaceae, Cunninghamellaceae, Demetiaceae, Moniliaceae, Mortierellaceae, Mucoraceae, Pythiaceae, Sacharomycetaceae, Saprolegniaceae, Schizosacharomycetaceae, Sodariaceae, Sporobolomycetaceae Tuberculariaceae, Adelotheciaceae, Dinophyceae, Ditrichaceae or Prasinophyceae, or a prokaryotic organism, for example a bacterium or blue alga, in particular a bacterium from the families Actinomycetaceae, Bacillaceae, Brevibacteriaceae, Corynebacteriaceae, Enterobacteriacae, Gordoniaceae, Nocardiaceae, Micrococcaceae, Mycobacteriaceae, Pseudomonaceae, Rhizobiaceae or Streptomycetaceae, this microorganism is grown on a solid or in a liquid medium which is known to the skilled worker and suits the organism. After the growing phase, the organisms can be harvested.

[0153] The microorganisms or the recovered, and if desired isolated, respective nitrogen or nitrogen containing compounds like amino acids can then be processed further directly into foodstuffs or animal feeds or for other applications, for example according to the disclosures made in EP-B-0 533 039 or EP-A-0 615 693, which are expressly incorporated herein by reference. The fermentation broth or fermentation products can be purified in the customary manner by extraction and precipitation or via ion exchangers and other methods known to the person skilled in the art and described herein below. Products of these different work-up procedures are amino acids or amino acid compositions which still comprise fermentation broth and cell components in different amounts, advantageously in the range of from 0 to 99% by weight, preferably below 80% by weight, especially preferably between below 50% by weight.

[0154] %

[0155] Preferred strains are strains selected from the group consisting of Bacillaceae, Brevibacteriaceae, Corynebacteriaceae, Nocardiaceae, Mycobacteriaceae, Streptomycetaceae, Enterobacteriaceae such as Bacillus circulans, Bacillus subtilis, Bacillus sp., Brevibacterium albidum, Brevibacterium album, Brevibacterium cerinum, Brevibacterium flavum, Brevibacterium glutamigenes, Brevibacterium iodinum, Brevibacterium ketoglutamicum, Brevibacterium lactofermentum, Brevibacterium linens, Brevibacterium roseum, Brevibacterium saccharolyticum, Brevibacterium sp., Corynebacterium acetoacidophilum, Corynebacterium acetoglutamicum, Corynebacterium ammoniagenes, Corynebacterium glutamicum (=Micrococcus glutamicum), Corynebacterium melassecola, Corynebacterium sp., Nocardia rhodochrous (Rhodococcus rhodochrous), Mycobacterium rhodochrous, Streptomyces lividans and Escherichia coli especially Escherichia coli K12.

[0156] In addition particular preferred strains are strains selected from the group consisting of Cryptococcaceae, Saccharomycetaceae, Schizosaccharo-mycetacease such as the genera Candida, Hansenula, Pichia, Saccharomyces and Schizosaccharomyces preferred are strains selected from the group consisting of the species Rhodotorula rubra, Rhodotorula glutinis, Rhodotorula graminis, Yarrowia lipolytica, Sporobolomyces salmonicolor, Sporobolomyces shibatanus, Saccharomyces cerevisiae, Candida boidinii, Candida bombicola, Candida cylindracea, Candida parapsilosis, Candida rugosa, Candida tropicalis, Pichia methanolica and Pichia pastoris.

[0157] Anacardiaceae such as the genera Pistacia, Mangifera, Anacardium e.g. the species Pistacia vera [pistachios, Pistazie], Mangifer indica [Mango] or Anacardium occidentale [Cashew]; Asteraceae such as the genera Calendula, Carthamus, Centaurea, Cichorium, Cynara, Helianthus, Lactuca, Locusta, Tagetes, Valeriana e.g. the species Calendula officinalis [Marigold], Carthamus tinctorius [safflower], Centaurea cyanus [cornflower], Cichorium intybus [blue daisy], Cynara scolymus [Artichoke], Helianthus annus [sunflower], Lactuca sativa, Lactuca crispa, Lactuca esculenta, Lactuca scariola L. ssp. sativa, Lactuca scariola L. var. integrata, Lactuca scariola L. var. integrifolia, Lactuca sativa subsp. romana, Locusta communis, Valeriana locusta [lettuce], Tagetes lucida, Tagetes erecta or Tagetes tenuifolia [Marigold]; Apiaceae such as the genera Daucus e.g. the species Daucus carota [carrot]; Betulaceae such as the genera Corylus e.g. the species Corylus avellana or Corylus colurna [hazelnut]; Boraginaceae such as the genera Borago e.g. the species Borago officinalis [borage]; Brassicaceae such as the genera Brassica, Melanosinapis, Sinapis, Arabadopsis e.g. the species Brassica napus, Brassica rapa ssp. [canola, oilseed rape, turnip rape], Sinapis arvensis Brassica juncea, Brassica juncea var. juncea, Brassica juncea var. crispifolia, Brassica juncea var. foliosa, Brassica nigra, Brassica sinapioides, Melanosinapis communis [mustard], Brassica oleracea [fodder beet] or Arabidopsis thaliana; Bromeliaceae such as the genera Anana, Bromelia e.g. the species Anana comosus, Ananas ananas or Bromelia comosa [pineapple]; Caricaceae such as the genera Carica e.g. the species Carica papaya [papaya]; Cannabaceae such as the genera Cannabis e.g. the species Cannabis sative [hemp], Convolvulaceae such as the genera Ipomea, Convolvulus e.g. the species Ipomoea batatus, Ipomoea pandurata, Convolvulus batatas, Convolvulus tiliaceus, Ipomoea fastigiata, Ipomoea tiliacea, Ipomoea triloba or Convolvulus panduratus [sweet potato, Man of the Earth, wild potato], Chenopodiaceae such as the genera Beta, i.e. the species Beta vulgaris, Beta vulgaris var. altissima, Beta vulgaris var. Vulgaris, Beta maritima, Beta vulgaris var. perennis, Beta vulgaris var. conditiva or Beta vulgaris var. esculenta [sugar beet]; Cucurbitaceae such as the genera Cucubita e.g. the species Cucurbita maxima, Cucurbita mixta, Cucurbita pepo or Cucurbita moschata [pumpkin, squash]; Elaeagnaceae such as the genera Elaeagnus e.g. the species Olea europaea [olive]; Ericaceae such as the genera Kalmia e.g. the species Kalmia latifolia, Kalmia angustifolia, Kalmia microphylla, Kalmia polifolia, Kalmia occidentalis, Cistus chamaerhodendros or Kalmia lucida [American laurel, broad-leafed laurel, calico bush, spoon wood, sheep laurel, alpine laurel, bog laurel, western bog-laurel, swamp-laurel]; Euphorbiaceae such as the genera Manihot, Janipha, Jatropha, Ricinus e.g. the species Manihot utilissima, Janipha manihot, Jatropha manihot, Manihot aipil, Manihot dulcis, Manihot manihot, Manihot melanobasis, Manihot esculenta [manihot, arrowroot, tapioca, cassaya] or Ricinus communis [castor bean, Castor Oil Bush, Castor Oil Plant, Palma Christi, Wonder Tree]; Fabaceae such as the genera Pisum, Albizia, Cathormion, Feuillea, Inga, Pithecolobium, Acacia, Mimosa, Medicajo, Glycine, Dolichos, Phaseolus, Soja e.g. the species Pisum sativum, Pisum arvense, Pisum humile [pea], Albizia berteriana, Albizia julibrissin, Albizia lebbeck, Acacia berteriana, Acacia littoralis, Albizia berteriana, Albizzia berteriana, Cathormion berteriana, Feuillea berteriana, Inga fragrans, Pithecellobium berterianum, Pithecellobium fragrans, Pithecolobium berterianum, Pseudalbizzia berteriana, Acacia julibrissin, Acacia nemu, Albizia nemu, Feuilleea julibrissin, Mimosa julibrissin, Mimosa speciosa, Sericanrda julibrissin, Acacia lebbeck, Acacia macrophylla, Albizia lebbek, Feuilleea lebbeck, Mimosa lebbeck, Mimosa speciosa [bastard logwood, silk tree, East Indian Walnut], Medicago sativa, Medicago falcata, Medicago varia [alfalfa] Glycine max Dolichos soja, Glycine gracilis, Glycine hispida, Phaseolus max, Soja hispida or Soja max [soybean]; Geraniaceae such as the genera Pelargonium, Cocos, Oleum e.g. the species Cocos nucifera, Pelargonium grossularioides or Oleum cocois [coconut]; Gramineae such as the genera Saccharum e.g. the species Saccharum officinarum; Juglandaceae such as the genera Juglans, Wallia e.g. the species Juglans regia, Juglans ailanthifolia, Juglans sieboldiana, Juglans cinerea, Wallia cinerea, Juglans bixbyi, Juglans californica, Juglans hindsii, Juglans intermedia, Juglans jamaicensis, Juglans major, Juglans microcarpa, Juglans nigra or Wallia nigra [walnut, black walnut, common walnut, persian walnut, white walnut, butternut, black walnut]; Lauraceae such as the genera Persea, Laurus e.g. the species laurel Laurus nobilis [bay, laurel, bay laurel, sweet bay], Persea americana Persea americana, Persea gratissima or Persea persea [avocado]; Leguminosae such as the genera Arachis e.g. the species Arachis hypogaea [peanut]; Linaceae such as the genera Linum, Adenolinum e.g. the species Linum usitatissimum, Linum humile, Linum austriacum, Linum bienne, Linum angustifolium, Linum catharticum, Linum flavum, Linum grandiflorum, Adenolinum grandiflorum, Linum lewisii, Linum narbonense, Linum perenne, Linum perenne var. lewisii, Linum pratense or Linum trigynum [flax, linseed]; Lythrarieae such as the genera Punica e.g. the species Punica granatum [pomegranate]; Malvaceae such as the genera Gossypium e.g. the species Gossypium hirsutum, Gossypium arboreum, Gossypium barbadense, Gossypium herbaceum or Gossypium thurberi [cotton]; Musaceae such as the genera Musa e.g. the species Musa nana, Musa acuminata, Musa paradisiaca, Musa spp. [banana]; Onagraceae such as the genera Camissonia, Oenothera e.g. the species Oenothera biennis or Camissonia brevipes [primrose, evening primrose]; Palmae such as the genera Elacis e.g. the species Elaeis guineensis [oil plam]; Papaveraceae such as the genera Papaver e.g. the species Papaver orientale, Papaver rhoeas, Papaver dubium [poppy, oriental poppy, corn poppy, field poppy, shirley poppies, field poppy, long-headed poppy, long-pod poppy]; Pedaliaceae such as the genera Sesamum e.g. the species Sesamum indicum [sesame]; Piperaceae such as the genera Piper, Artanthe, Peperomia, Steffensia e.g. the species Piper aduncum, Piper amalago, Piper angustifolium, Piper auritum, Piper betel, Piper cubeba, Piper longum, Piper nigrum, Piper retrofractum, Artanthe adunca, Artanthe elongata, Peperomia elongata, Piper elongatum, Steffensia elongata. [Cayenne pepper, wild pepper]; Poaceae such as the genera Hordeum, Secale, Avena, Sorghum, Andropogon, Holcus, Panicum, Oryza, Zea, Triticum e.g. the species Hordeum vulgare, Hordeum jubatum, Hordeum murinum, Hordeum secalinum, Hordeum distichon Hordeum aegiceras, Hordeum hexastichon., Hordeum hexastichum, Hordeum irregulare, Hordeum sativum, Hordeum secalinum [barley, pearl barley, foxtail barley, wall barley, meadow barley], Secale cereale [rye], Avena sativa, Avena fatua, Avena byzantina, Avena fatua var. sativa, Avena hybrida [oat], Sorghum bicolor, Sorghum halepense, Sorghum saccharatum, Sorghum vulgare, Andropogon drummondii, Holcus bicolor, Holcus sorghum, Sorghum aethiopicum, Sorghum arundinaceum, Sorghum caffrorum, Sorghum cernuum, Sorghum dochna, Sorghum drummondii, Sorghum durra, Sorghum guineense, Sorghum lanceolatum, Sorghum nervosum, Sorghum saccharatum, Sorghum subglabrescens, Sorghum verticilliflorum, Sorghum vulgare, Holcus halepensis, Sorghum miliaceum millet, Panicum militaceum [Sorghum, millet], Oryza sativa, Oryza latifolia [rice], Zea mays [corn, maize] Triticum aestivum, Triticum durum, Triticum turgidum, Triticum hybernum, Triticum macha, Triticum sativum or Triticum vulgare [wheat, bread wheat, common wheat], Proteaceae such as the genera Macadamia e.g. the species Macadamia intergrifolia [macadamia]; Rubiaceae such as the genera Coffea e.g. the species Cofea spp., Coffea arabica, Coffea canephora or Coffea liberica [coffee]; Scrophulariaceae such as the genera Verbascum e.g. the species Verbascum blattaria, Verbascum chaixii, Verbascum densiflorum, Verbascum lagurus, Verbascum longifolium, Verbascum lychnitis, Verbascum nigrum, Verbascum olympicum, Verbascum phlomoides, Verbascum phoenicum, Verbascum pulverulentum or Verbascum thapsus [mullein, white moth mullein, nettle-leaved mullein, dense-flowered mullein, silver mullein, long-leaved mullein, white mullein, dark mullein, greek mullein, orange mullein, purple mullein, hoary mullein, great mullein]; Solanaceae such as the genera Capsicum, Nicotiana, Solanum, Lycopersicon e.g. the species Capsicum annuum, Capsicum annuum var. glabriusculum, Capsicum frutescens [pepper], Capsicum annuum [paprika], Nicotiana tabacum, Nicotiana alata, Nicotiana attenuata, Nicotiana glauca, Nicotiana langsdorffii, Nicotiana obtusifolia, Nicotiana quadrivalvis, Nicotiana repanda, Nicotiana rustica, Nicotiana sylvestris [tobacco], Solanum tuberosum [potato], Solanum melongena [egg-plant] (Lycopersicon esculentum, Lycopersicon lycopersicum., Lycopersicon pyriforme, Solanum integrifolium or Solanum lycopersicum [tomato]; Sterculiaceae such as the genera Theobroma e.g. the species Theobroma cacao [cacao]; Theaceae such as the genera Camellia e.g. the species Camellia sinensis) [tea] can either be donor organisms for the nucleic acids or polypeptides of the invention or used in the present invention or represents preferred host organims.

[0158] Particular preferred host plants are plants selected from the group consisting of Asteraceae such as the genera Helianthus, Tagetes e.g. the species Helianthus annus [sunflower], Tagetes lucida, Tagetes erecta or Tagetes tenuifolia [Marigold], Brassicaceae such as the genera Brassica, Arabadopsis e.g. the species Brassica napus, Brassica rapa ssp. [canola, oilseed rape, turnip rape] or Arabidopsis thaliana. Fabaceae such as the genera Glycine e.g. the species Glycine max, Soja hispida or Soja max [soybean]. Linaceae such as the genera Linum e.g. the species Linum usitatissimum, [flax, linseed]; Poaceae such as the genera Hordeum, Secale, Avena, Sorghum, Oryza, Zea, Triticum e.g. the species Hordeum vulgare [barley]; Secale cereale [rye], Avena sativa, Avena fatua, Avena byzantina, Avena fatua var. sativa, Avena hybrida [oat], Sorghum bicolor [Sorghum, millet], Oryza sativa, Oryza latifolia [rice], Zea mays [corn, maize] Triticum aestivum, Triticum durum, Triticum turgidum, Triticum hybernum, Triticum macha, Triticum sativum or Triticum vulgare [wheat, bread wheat, common wheat]; Solanaceae such as the genera Solanum, Lycopersicon e.g. the species Solanum tuberosum [potato], Lycopersicon esculentum, Lycopersicon lycopersicum., Lycopersicon pyriforme, Solanum integrifolium or Solanum lycopersicum [tomato]. A further preferred host organism is cotton for example Gossypium hirsutum, Gossypium arboreum, Gossypium barbadense, Gossypium herbaceum or Gossypium thurberi.

[0159] All abovementioned organisms can in princible also function as donor organisms.

[0160] With regard to the nucleic acid sequence as depicted a nucleic acid construct which contains a nucleic acid sequence mentioned herein or an organism (=transgenic organism) which is transformed with said nucleic acid sequence or said nucleic acid construct, “transgene” means all those constructs which have been brought about by genetic manipulation methods, preferably in which either
[0161] a) a nucleic acid sequence selected from the group as indicated in Table I, columns 5 or 7, lines 1, 2, 3, 4 and/or 5, or a derivative thereof, or
[0162] b) a genetic regulatory element, for example a promoter, which is functionally linked to the nucleic acid sequence as indicated in Table I, columns 5 or 7, lines 1, 2, 3 4 and/or 5, or a derivative thereof, or
[0163] c) (a) and (b)
   is/are not present in its/their natural genetic environment or has/have been modified by means of genetic manipulation methods, it being possible for the modification to be, by way of example, a substitution, addition, deletion, inversion or insertion of one or more nucleotide. “Natural genetic environment” means the natural chromosomal locus in the organism of origin or the presence in a genomic library. In the case of a genomic library, the natural, genetic environment of the nucleic acid sequence is preferably at least partially still preserved. The environment flanks the nucleic acid sequence at least on one side and has a sequence length of at least 50 bp, preferably at least 500 bp, particularly preferably at least 1000 bp, very particularly preferably at least 5000 bp.

[0164] The use of the nucleic acid sequence according to the invention or of the nucleic acid construct according to the invention for the generation of transgenic plants is therefore also subject matter of the invention.

[0165] In an advantageous embodiment of the invention, the organism takes the form of a plant whose nitrogen or nitrogen containing compound content is modified advantageously owing to the nucleic acid molecule of the present invention expressed. This is important for plant breeders for several reasons:
[0166] a) The fast majority of nitrogen is present in cells in form of protein bound amino acids. Therefore an increased nitrogen or nitrogen containing compound content reflects an increased protein content and therefore additional nutritional value for the feed industry.
[0167] b) A method for increased nitrogen uptake and/or accumulation of nitrogen or nitrogen containing compounds might allow to reduce the application of nitrogen-fertilzers, which in turn lead to reduced costs and environmental benefits.
[0168] c) A method for increased nitrogen uptake and/or accumulation might support plant growth, health and productivity, preferably under nitrogen limited conditions.

[0169] In one embodiment, after an activity of a polypeptide of the present invention or used in the process of the present invention has been increased or generated, or after the expression of a nucleic acid molecule or polypeptide according to the invention has been generated or increased, the transgenic plant generated can be grown on or in a nutrient medium or else in the soil and subsequently harvested. In one embodiment the transgenic plant generated can be grown under nitrogen limiting conditions.

[0170] The plants or parts thereof, e.g. the leaves, roots, flowers, and/or stems and/or other harvestable material as described below, can then be used directly as foodstuffs or animal feeds or else be further processed. Again, the amino acids can be purified further in the customary manner via extraction and precipitation or via ion exchangers and other methods known to the person skilled in the art and described herein below. Products which are suitable for various applications and which result from these different processing procedures are amino acids or amino acid compositions which can still comprise further plant components in different amounts, advantageously in the range of from 0 to 99% by weight, preferably from below 90% by weight, especially preferably below 80% by weight. The plants can also advantageously be used directly without further processing, e.g. as feed or for extraction.

[0171] The chemically pure nitrogen containing compounds or chemically pure compositions comprising nitrogen or nitrogen containing compounds may also be produced by the process described above. To this end, nitrogen or nitrogen containing compounds or the compositions are isolated in the known manner from an organism according to the invention, such as the microorganisms, non-human animal or the plants, and/or their culture medium in which or on which the organisms had been grown. These chemically pure nitrogen containing compounds or said compositions are advantageous for applications in the field of the feed or food industry.

[0172] In a preferred embodiment, the present invention relates to a process for for the enhanced nitrogen assimilation, accumulation and/or utilization in photosynthetic active organisms, which comprises, increasing or generating in an organism or a part or a compartment thereof the expression of at least one nucleic acid molecule comprising a nucleic acid molecule selected from the group consisting of:
[0173] a) nucleic acid molecule encoding a polypeptide selected from the group as shown in table II, columns 5 and 7 or a fragment thereof, which confers enhanced nitrogen assimilation, accumulation and/or utilization,
[0174] b) nucleic acid molecule comprising of a nucleic acid molecule selected from the group as shown in table I, columns 5 and 7 which confers enhanced nitrogen assimilation, accumulation and/or utilization
[0175] c) nucleic acid molecule whose sequence can be deduced from a polypeptide sequence encoded by a nucleic acid molecule of (a) or (b) as a result of the degeneracy of the genetic code and which confers enhanced nitrogen assimilation, accumulation and/or utilization
[0176] d) nucleic acid molecule which encodes a polypeptide which has at least 50% identity with the amino acid sequence of the polypeptide encoded by the nucleic acid molecule of (a) to (c) and which confers enhanced nitrogen assimilation, accumulation and/or utilization
[0177] e) nucleic acid molecule which hybidizes with a nucleic acid molecule of (a) to (c) under stringent hybridisation and which confers enhanced nitrogen assimilation, accumulation and/or utilization
[0178] f) nucleic acid molecule which encompasses a nucleic acid molecule which is obtained by amplifying nucleic acid molecules from a cDNA library or a genomic library using the primers or primer pairs as indicated in table III, column 7 and which confers enhanced nitrogen assimilation, accumulation and/or utilization
[0179] g) nucleic acid molecule encoding a polypeptide which is isolated with the aid of monoclonal antibodies against a polypeptide encoded by one of the nucleic acid molecules of (a) to (f) and which confers enhanced nitrogen assimilation, accumulation and/or utilization
[0180] h) nucleic acid molecule encoding a polypeptide comprising a consensus as shown in table IV, columns 7 and which confers enhanced nitrogen assimilation, accumulation and/or utilization
[0181] i) nucleic acid molecule which is obtainable by screening a suitable nucleic acid library under stringent hybridization conditions with a probe comprising one of the sequences of the nucleic acid molecule of (a) to (k) or with a fragment thereof having at least 15 nt, preferably 20 nt, 30 nt, 50 nt, 100 nt, 200 nt or 500 nt of the nucleic acid molecule characterized in (a) to (k) and which confers enhanced nitrogen assimilation, accumulation and/or utilization
   or comprising a sequence which is complementary thereto.

[0182] In one embodiment, the nucleic acid molecule used in the process of the invention distinguishes over the sequence indicated in Table IA, columns 5 or 7, by one or more nucleotides. In one embodiment, the nucleic acid molecule used in the process of the invention does not consist of the sequence shown in Table I A, columns 5 or 7: In one embodiment, the nucleic acid molecule used in the process of the invention is less than 100%, 99,999%, 99,99%, 99,9% or 99% identical to a sequence indicated in Table I A, columns 5 or 7. In another embodiment, the nucleic acid molecule does not encode a polypeptide of a sequence indicated in Table II A, columns 5 or 7.

[0183] In one embodiment, the nucleic acid molecule used in the process of the invention distinguishes over the sequence indicated in Table I B, columns 5 or 7, by one or more nucleotides. In one embodiment, the nucleic acid molecule used in the process of the invention does not consist of the sequence shown in indicated in Table I B, columns 5 or 7.

[0184] In one embodiment, the nucleic acid molecule used in the process of the invention is less than 100%, 99,999%, 99,99%, 99,9% or 99% identical to a sequence indicated in Table I B, columns 5 or 7. In another embodiment, the nucleic acid molecule does not encode a polypeptide of a sequence indicated in Table II B, columns 5 or 7.

[0185] In one embodiment, the nucleic acid molecule of the invention or used in the process of the invention distinguishes over the sequence indicated in Table I, columns 5 or 7, by one or more nucleotides. In one embodiment, the nucleic acid molecule of the invention or the nucleic acid used in the process of the invention does not consist of the sequence shown in indicated in Table I, columns 5 or 7. In one embodiment, the nucleic acid molecule of the present invention is less than 100%, 99.999%, 99.99%, 99.9% or 99% identical to a sequence indicated in Table I, columns 5 or 7. In another embodiment, the nucleic acid molecule does not encode a polypeptide of a sequence indicated in Table II, columns 5 or 7.

[0186] Unless otherwise specified, the terms “polynucleotides”, “nucleic acid” and “nucleic acid molecule” are interchangeably in the present context. Unless otherwise specified, the terms “peptide”, “polypeptide” and “protein” are interchangeably in the present context. The term “sequence” may relate to polynucleotides, nucleic acids, nucleic acid molecules, peptides, polypeptides and proteins, depending on the context in which the term “sequence” is used. The terms “gene(s)”, “polynucleotide”, “nucleic acid sequence”, “nucleotide sequence”, or “nucleic acid molecule(s)” as used herein refers to a polymeric form of nucleotides of any length, either ribonucleotides or deoxyribonucleotides. The terms refer only to the primary structure of the molecule.

[0187] Thus, The terms “gene(s)”, “polynucleotide”, “nucleic acid sequence”, “nucleotide sequence”, or “nucleic acid molecule(s)” as used herein include double- and single-stranded DNA and RNA. They also include known types of modifications, for example, methylation, “caps”, substitutions of one or more of the naturally occurring nucleotides with an analog. Preferably, the DNA or RNA sequence of the invention comprises a coding sequence encoding the herein defined polypeptide.

[0188] A “coding sequence” is a nucleotide sequence, which is transcribed into mRNA and/or translated into a polypeptide when placed under the control of appropriate regulatory sequences. The boundaries of the coding sequence are determined by a translation start codon at the 5′-terminus and a translation stop codon at the 3′-terminus. A coding sequence can include, but is not limited to mRNA, cDNA, recombinant nucleotide sequences or genomic DNA, while introns may be present as well under certain circumstances.

[0189] Nucleic acid molecules with the sequence as indicated in Table I, columns 5 or 7, nucleic acid molecules which are derived from a amino acid sequences as indicated in Table II, columns 5 or 7, or from polypeptides comprising the consensus sequence as indicated in Table IV, columns 7, or their derivatives or homologues encoding polypeptides with the enzymatic or biological activity of a polypeptide as indicated in Table II, column 3, 5 or 7, or e.g. conferring a increase of nitrogen or nitrogen containing compounds after increasing its expression or activity in the cytosol or in the plastids are advantageously increased in the process according to the invention.

[0190] In one embodiment, said sequences are cloned into nucleic acid constructs, either individually or in combination. These nucleic acid constructs enable an optimal accumulation and/or synthesis of nitrogen or nitrogen containing compounds respectively produced in the process according to the invention.

[0191] Nucleic acid molecules, which are advantageous for the process according to the invention and which encode polypeptides with an activity of a polypeptide of the invention or the polypeptide used in the method of the invention or used in the process of the invention, e.g. of a protein as indicated in Table II, column 5, or being encoded by a nucleic acid molecule indicated in Table I, column 5, or of its homologs, e.g. as indicated in Table II, column 7, can be determined from generally accessible databases.

[0192] Those, which must be mentioned, in particular in this context are general gene databases such as the EMBL database (Stoesser G. et al., Nucleic Acids Res 2001, Vol. 29, 17-21), the GenBank database (Benson D. A. et al., Nucleic Acids Res 2000, Vol. 28, 15-18), or the PIR database (Barker W. C. et al., Nucleic Acids Res. 1999, Vol. 27, 39-43). It is furthermore possible to use organism-specific gene databases for determining advantageous sequences, in the case of yeast for example advantageously the SGD database (Chemy J. M. et al., Nucleic Acids Res. 1998, Vol. 26, 73-80) or the MIPS database (Mewes H. W. et al., Nucleic Acids Res. 1999, Vol. 27, 44-48), in the case of E. coli the GenProtEC database (http://web.bham.ac.uk/bcm4ght6/res.html), and in the case of Arabidopsis the TAIR-database (Huala, E. et al., Nucleic Acids Res. 2001 Vol. 29(1), 102-5) or the MIPS database.

[0193] The nucleic acid molecules used in the process according to the invention take the form of isolated nucleic acid sequences, which encode polypeptides with an activity of a polypeptide selected from the group as indicated in Table I, column 3, lines 1, 2, 3 4 and/or 5 or having the sequence of a polypeptide as indicated in Table II, columns 5 and 7, lines 1, 2, 3, 4 and/or 5 and conferring an increase of nitrogen or nitrogen containing compounds.

[0194] The nucleic acid sequence(s) used in the process for the production of nitrogen or nitrogen containing compounds in transgenic organisms originate advantageously from an eukaryote but may also originate from a prokaryote or an archebacterium, thus it can derived from e.g. a microorganism, an animal or a plant.

[0195] For the purposes of the invention, as a rule the plural is intended to encompass the singular and vice versa.

[0196] In order to improve the introduction of the nucleic acid sequences and the expression of the sequences in the transgenic organisms, which are used in the process, the nucleic acid sequences are incorporated into a nucleic acid construct and/or a vector. In addition to the herein described sequences which are used in the process according to the invention, further nucleic acid sequences, advantageously encoding nitrogen assimilation or amino acid biosynthesis genesor nutritional valuable storage proteins, may additionally be present in the nucleic acid construct or in the vector and may be introduced into the organism together. However, these additional sequences may also be introduced into the organisms via other, separate nucleic acid constructs or vectors.

[0197] Using the herein mentioned cloning vectors and transformation methods such as those which are published and cited in: Plant Molecular Biology and Biotechnology (CRC Press, Boca Raton, Fla.), chapter 6/7, pp. 71-119 (1993); F. F. White, Vectors for Gene Transfer in Higher Plants; in: Transgenic Plants, vol. 1, Engineering and Utilization, Ed.: Kung and R. Wu, Academic Press, 1993, 15-38; B. Jenes et al., Techniques for Gene Transfer, in: Transgenic Plants, vol. 1, Engineering and Utilization, Ed.: Kung and R. Wu, Academic Press (1993), 128-143; Potrykus, Annu. Rev. Plant Physiol. Plant Molec. Biol. 42 (1991), 205-225)) and further cited below, the nucleic acids may be used for the recombinant modification of a wide range of organisms, in particular prokaryotic or eukaryotic microorganisms or plants, so that they become a better and more efficient accumulater and/or producer of nitrogen or nitrogen containing compounds respectively according to the invention. This improved accmulation of nitrogen or production of nitrogen containing compounds or products derived there from, such as proteins, can be brought about by a direct effect of the manipulation or by an indirect effect of this manipulation.

[0198] In one embodiment, the nucleic acid molecule according to the invention originates from a plant, such as a plant selected from the families Aceraceae, Anacardiaceae, Apiaceae, Asteraceae, Brassicaceae, Cactaceae, Cucurbitaceae, Euphorbiaceae, Fabaceae, Malvaceae, Nymphaeaceae, Papaveraceae, Rosaceae, Salicaceae, Solanaceae, Arecaceae, Bromeliaceae, Cyperaceae, Iridaceae, Liliaceae, Orchidaceae, Gentianaceae, Labiaceae, Magnoliaceae, Ranunculaceae, Carifolaceae, Rubiaceae, Scrophulariaceae, Caryophyllaceae, Ericaceae, Polygonaceae, Violaceae, Juncaceae or Poaceae and preferably from a plant selected from the group of the families Apiaceae, Asteraceae, Brassicaceae, Cucurbitaceae, Fabaceae, Papaveraceae, Rosaceae, Solanaceae, Liliaceae or Poaceae. Preferred are crop plants and in particular plants mentioned herein above as host plants such as the families and genera mentioned above for example preferred the species Anacardium occidentale, Calendula officinalis, Carthamus tinctorius, Cichorium intybus, Cynara scolymus, Helianthus annus Tagetes lucida, Tagetes erecta, Tagetes tenuifolia; Daucus carota; Corylus avellana, Corylus colurna, Borago officinalis; Brassica napus, Brassica rapa ssp., Sinapis arvensis Brassica juncea, Brassica juncea var. juncea, Brassica juncea var. crispifolia, Brassica juncea var. foliosa, Brassica nigra, Brassica sinapioides, Melanosinapis communis, Brassica oleracea, Arabidopsis thaliana, Anana comosus, Ananas ananas, Bromelia comosa, Carica papaya, Cannabis sative, Ipomoea batatus, Ipomoea pandurata, Convolvulus batatas, Convolvulus tiliaceus, Ipomoea fastigiata, Ipomoea tiliacea, Ipomoea triloba, Convolvulus panduratus, Beta vulgaris, Beta vulgaris var. altissima, Beta vulgaris var. vulgaris, Beta maritima, Beta vulgaris var. perennis, Beta vulgaris var. conditiva, Beta vulgaris var. esculenta, Cucurbita maxima, Cucurbita mixta, Cucurbita pepo, Cucurbita moschata, Olea europaea, Manihot utilissima, Janipha manihot, Jatropha manihot, Manihot aipil, Manihot dulcis, Manihot manihot, Manihot melanobasis, Manihot esculenta, Ricinus communis, Pisum sativum, Pisum arvense, Pisum humile, Medicago sativa, Medicago falcata, Medicago varia, Glycine max Dolichos soja, Glycine gracilis, Glycine hispida, Phaseolus max, Soja hispida, Soja max, Cocos nucifera, Pelargonium grossularioides, Oleum cocoas, Laurus nobilis, Persea americana, Arachis hypogaea, Linum usitatissimum, Linum humile, Linum austriacum, Linum bienne, Linum angustifolium, Linum catharticum, Linum flavum, Linum grandiflorum, Adenolinum grandiflorum, Linum lewisii, Linum narbonense, Linum perenne, Linum perenne var. lewisii, Linum pratense, Linum trigynum, Punica granatum, Gossypium hirsutum, Gossypium arboreum, Gossypium barbadense, Gossypium herbaceum, Gossypium thurberi, Musa nana, Musa acuminata, Musa paradisiaca, Musa spp., Elaeis guineensis, Papaver orientale, Papaver rhoeas, Papaver dubium, Sesamum indicum, Piper aduncum, Piper amalago, Piper angustifolium, Piper auritum, Piper betel, Piper cubeba, Piper longum, Piper nigrum, Piper retrofractum, Artanthe adunca, Artanthe elongata, Peperomia elongata, Piper elongatum, Steffensia elongata, Hordeum vulgare, Hordeum jubatum, Hordeum murinum, Hordeum secalinum, Hordeum distichon Hordeum aegiceras, Hordeum hexastichon., Hordeum hexastichum, Hordeum irregulare, Hordeum sativum, Hordeum secalinum, Avena sativa, Avena fatua, Avena byzantina, Avena fatua var. sativa, Avena hybrida, Sorghum bicolor, Sorghum halepense, Sorghum saccharatum, Sorghum vulgare, Andropogon drummondii, Holcus bicolor, Holcus sorghum, Sorghum aethiopicum, Sorghum arundinaceum, Sorghum caffrorum, Sorghum cernuum, Sorghum dochna, Sorghum drummondii, Sorghum durra, Sorghum guineense, Sorghum lanceolatum, Sorghum nervosum, Sorghum saccharatum, Sorghum subglabrescens, Sorghum verticilliflorum, Sorghum vulgare, Holcus halepensis, Sorghum miliaceum millet, Panicum militaceum, Zea mays, Triticum aestivum, Triticum durum, Triticum turgidum, Triticum hybernum, Triticum macha, Triticum sativum or Triticum vulgare, Cofea spp., Coffea arabica, Coffea canephora, Coffea liberica, Capsicum annuum, Capsicum annuum var. glabriusculum, Capsicum frutescens, Capsicum annuum, Nicotiana tabacum, Solanum tuberosum, Solanum melongena, Lycopersicon esculentum, Lycopersicon lycopersicum., Lycopersicon pyriforme, Solanum integrifolium, Solanum lycopersicum Theobroma cacao or Camellia sinensis.

[0199] In one embodiment, the nucleic acid molecule sequence for the accumulation and/or production of nitrogen or nitrogen containing compounds originates advantageously from a microorganism as mentioned above under host organism such as a fungus for example the genera Aspergillus, Penicillium or Claviceps or from yeasts such as the genera Pichia, Torulopsis, Hansenula, Schizosaccharomyces, Candida, Rhodotorula or Saccharomyces, very especially advantageously from the yeast of the family Saccharomycetaceae, such as the advantageous genus Saccharomyces and the very advantageous genus and species Saccharomyces cerevisiae.

[0200] The skilled worker knows other suitable sources for nucleic acids that can be used for the accumulation and/or production of nitrogen or nitrogen containing compounds respectively. They include in general all prokaryotic or eukaryotic cells, preferably unicellular microorganisms, such as fungi like the genus Claviceps or Aspergillus or gram-positive bacteria such as the genera Bacillus, Corynebacterium, Micrococcus, Brevibacterium, Rhodococcus, Nocardia, Caseobacter or Arthrobacter or gram-negative bacteria such as the genera Escherichia, Flavobacterium or Salmonella, or yeasts such as the genera Rhodotorula, Hansenula or Candida.

[0201] %

[0202] However, it is also possible to use artificial sequences, which differ in one or more bases from the nucleic acid sequences found in organisms, or in one or more amino acid molecules from polypeptide sequences found in organisms, in particular from the polypeptide sequences indicated in Table II, columns 5 or 7, or the functional homologues thereof as described herein, preferably conferring above-mentioned activity, i.e. conferring a increase of nitrogen or nitrogen containing compounds after increasing its activity. In preferred embodiments of the present invention the polypeptide sequences indicated in Table II, columns 5 or 7, or the functional homologues thereof as described herein, preferably conferring above-mentioned activity, i.e. conferring a increase of nitrogen or nitrogen containing compounds after increasing its activity, are expressed from nucleic acid sequences which have been optimized according the codon usage in the selected host organism or organelle. The person skilled in the art is familiar with sources for tables showing the preferred codon usage for the different amino acids in the selected organims.

[0203] In the process according to the invention nucleic acid sequences can be used, which, if appropriate, contain synthetic, non-natural or modified nucleotide bases, which can be incorporated into DNA or RNA. Said synthetic, non-natural or modified bases can for example increase the stability of the nucleic acid molecule outside or inside a cell. The nucleic acid molecules of the invention can contain the same modifications as aforementioned.

[0204] As used in the present context the term “nucleic acid molecule” may also encompass the untranslated sequence located at the 3′ and at the 5′ end of the coding gene region, for example at least 500, preferably 200, especially preferably 100, nucleotides of the sequence upstream of the 5′ end of the coding region and at least 100, preferably 50, especially preferably 20, nucleotides of the sequence downstream of the 3′ end of the coding gene region. It is often advantageous only to choose the coding region for cloning and expression purposes.

[0205] Preferably, the nucleic acid molecule used in the process according to the invention or the nucleic acid molecule of the invention is an isolated nucleic acid molecule.

[0206] An “isolated” polynucleotide or nucleic acid molecule is separated from other polynucleotides or nucleic acid molecules, which are present in the natural source of the nucleic acid molecule. An isolated nucleic acid molecule may be a chromosomal fragment of several kb, or preferably, a molecule only comprising the coding region of the gene. Accordingly, an isolated nucleic acid molecule of the invention may comprise chromosomal regions, which are adjacent 5′ and 3′ or further adjacent chromosomal regions, but preferably comprises no such sequences which naturally flank the nucleic acid molecule sequence in the genomic or chromosomal context in the organism from which the nucleic acid molecule originates (for example sequences which are adjacent to the regions encoding the 5′- and 3′-UTRs of the nucleic acid molecule). In various embodiments, the isolated nucleic acid molecule used in the process according to the invention may, for example comprise less than approximately 5 kb, 4 kb, 3 kb, 2 kb, 1 kb, 0.5 kb or 0.1 kb nucleotide sequences which naturally flank the nucleic acid molecule in the genomic DNA of the cell from which the nucleic acid molecule originates.

[0207] The nucleic acid molecules used in the process, for example the polynucleotides of the invention or of a part thereof can be isolated using molecular-biological standard techniques and the sequence information provided herein. Also, for example a homologous sequence or homologous, conserved sequence regions at the DNA or amino acid level can be identified with the aid of comparison algorithms. The former can be used as hybridization probes under standard hybridization techniques (for example those described in Sambrook et al., Molecular Cloning: A Laboratory Manual. 2nd Ed., Cold Spring Harbor Laboratory, Cold Spring Harbor Laboratory Press, Cold Spring Harbor, N.Y., 1989) for isolating further nucleic acid sequences useful in this process.

[0208] A nucleic acid molecule encompassing a complete sequence of the nucleic acid molecules used in the process, for example the polynucleotide of the invention, or a part thereof may additionally be isolated by polymerase chain reaction, oligonucleotide primers based on this sequence or on parts thereof being used. For example, a nucleic acid molecule comprising the complete sequence or part thereof can be isolated by polymerase chain reaction using oligonucleotide primers which have been generated on the basis of this sequence for example, mRNA can be isolated from cells (for example by means of the guanidinium thiocyanate extraction method of Chirgwin et al. (1979) Biochemistry 18:5294-5299) and cDNA can be generated by means of reverse transcriptase (for example Moloney MLV reverse transcriptase, available from Gibco/BRL, Bethesda, Md., or AMV reverse transcriptase, obtainable from Seikagaku America, Inc., St. Petersburg, Fla.).

[0209] Synthetic oligonucleotide primers for the amplification, e.g. as the pairs indicated in Table III, columns 7, lines 1, 2, 3 4 and/or 5, by means of polymerase chain reaction can be generated on the basis of a sequence shown herein, for example the sequence as indicated in Table I, columns 5 or 7, lines 1, 2, 3, 4 and/or 5 or the nucleic acid sequences derived from polypeptide sequences as indicated in Table II, columns 5 or 7, lines 1, 2, 3, 4 and/or 5.

[0210] Moreover, it is possible to identify conserved regions from various organisms by carrying out protein sequence alignments with the polypeptide encoded by the nucleic acid molecules of the present invention, in particular with the sequences selected from the group as shown in column 5 or 7 of Table II, from which conserved regions, and in turn, degenerate primers can be derived.

[0211] Conserved regions are those, which show a very little variation in the amino acid in one particular position of several homologs from different origin. The consenus sequence and polypeptide motifs shown in column 7 of Table IV are derived from said alignments. Moreover, it is possible to identify conserved regions from various organisms by carrying out protein sequence alignments with the polypeptide encoded by the nucleic acid of the present invention, in particular with the polypeptide molecules shown in column 5 or 7 of Table II, from which conserved regions, and in turn, degenerate primers can be derived.

[0212] In one advantageous embodiment, in the method of the present invention the activity of a polypeptide is increased comprising or consisting of a consensus sequence or a polypeptide motif shown in table IV column 7 and in one another embodiment, the present invention relates to a polypeptide comprising or consisting of a consensus sequence or a polypeptide motif shown in table IV, column 7 whereby 20 or less, preferably 15 or 10, preferably 9, 8, 7, or 6, more preferred 5 or 4, even more preferred 3, even more preferred 2, even more preferred 1, most preferred 0 of the amino acids positions indicated can be replaced by any amino acid. In one embodiment not more than 15%, preferably 10%, even more preferred 5%, 4%, 3%, or 2%, most preferred 1% or 0% of the amino acid position indicated by a letter are/is replaced another amino acid. In one embodiment 20 or less, preferably 15 or 10, preferably 9, 8, 7, or 6, more preferred 5 or 4, even more preferred 3, even more preferred 2, even more preferred 1, most preferred 0 amino acids are inserted into a consensus sequence or protein motif.

[0213] The consensus sequence was derived from a multiple alignment of the sequences as listed in column 5 and 7 of table II. The letters represent the one letter amino acid code and indicate that the amino acids are conserved in all aligned proteins. The letter X stands for amino acids, which are not conserved in all sequences. In one example, in the cases where only a small selected subset of amino acids are possible at a certain position these amino acids are given in brackets. The number of given X indicates the distances between conserved amino acid residues, e.g. Y-x(21,23)-F means that conserved tyrosine and phenylalanine residues are separated from each other by minimum 21 and maximum 23 amino acid residues in all investigated sequences.

[0214] Conserved domains were identified from all sequences and are described using a subset of the standard Prosite notation, e.g. the pattern Y-x(21,23)-[FW] means that a conserved tyrosine is separated by minimum 21 and maximum 23 amino acid residues from either a phenylalanine or tryptophane.

[0215] Conserved patterns were identified with the software tool MEME version 3.5.1 or manually. MEME was developed by Timothy L. Bailey and Charles Elkan, Dept. of Computer Science and Engineering, University of California, San Diego, USA and is described by Timothy L. Bailey and Charles Elkan [Fitting a mixture model by expectation maximization to discover motifs in biopolymers, Proceedings of the Second International Conference on Intelligent Systems for Molecular Biology, pp. 28-36, AAAI Press, Menlo Park, Calif., 1994]. The source code for the stand-alone program is public available from the San Diego Supercomputer center (http://meme.sdsc.edu).

[0216] For identifying common motifs in all sequences with the software tool MEME, the following settings were used: −maxsize 500000, −nmotifs 15, −evt 0.001, −maxw 60, −distance 1e-3, −minsites number of sequences used for the analysis. Input sequences for MEME were non-aligned sequences in Fasta format. Other parameters were used in the default settings in this software version.

[0217] Prosite patterns for conserved domains were generated with the software tool Pratt version 2.1 or manually. Pratt was developed by Inge Jonassen, Dept. of Informatics, University of Bergen, Norway and is described by Jonassen et al. [I. Jonassen, J. F. Collins and D. G. Higgins, Finding flexible patterns in unaligned protein sequences, Protein Science 4 (1995), pp. 1587-1595; I. Jonassen, Efficient discovery of conserved patterns using a pattern graph, Submitted to CABIOS Febr. 1997]. The source code (ANSI C) for the stand-alone program is public available, e.g. at established Bioinformatic centers like EBI (European Bioinformatics Institute).

[0218] For generating patterns with the software tool Pratt, following settings were used: PL (max Pattern Length): 100, PN (max Nr of Pattern Symbols): 100, PX (max Nr of consecutive x's): 30, FN (max Nr of flexible spacers): 5, FL (max Flexibility): 30, FP (max Flex.Product): 10, ON (max number patterns): 50. Input sequences for Pratt were distinct regions of the protein sequences exhibiting high similarity as identified from software tool MEME. The minimum number of sequences, which have to match the generated patterns (CM, min Nr of Seqs to Match) was set to at least 80% of the provided sequences. Parameters not mentioned here were used in their default settings.

[0219] The Prosite patterns of the conserved domains can be used to search for protein sequences matching this pattern. Various established Bioinformatic centers provide public internet portals for using those patterns in database searches (e.g. PIR [Protein Information Resource, located at Georgetown University Medical Center] or ExPASy [Expert Protein Analysis System]). Alternatively, stand-alone software is available, like the program Fuzzpro, which is part of the EMBOSS software package. For example, the program Fuzzpro not only allows to search for an exact pattern-protein match but also allows to set various ambiguities in the performed search.

[0220] The alignment was performed with the software ClustalW (version 1.83) and is described by Thompson et al. [Thompson, J. D., Higgins, D. G. and Gibson, T. J. (1994) CLUSTAL W: improving the sensitivity of progressive multiple sequence alignment through sequence weighting, positions-specific gap penalties and weight matrix choice. Nucleic Acids Research, 22:4673-4680]. The source code for the stand-alone program is public available from the European Molecular Biology Laboratory; Heidelberg, Germany. The analysis was performed using the default parameters of ClustalW v1.83 (gap open penalty: 10.0; gap extension penalty: 0.2; protein matrix: Gonnet; pprotein/DNA endgap: −1; protein/DNA gapdist: 4).

[0221] Degenerated primers can then be utilized by PCR for the amplification of fragments of novel proteins having above-mentioned activity, e.g. conferring the increase of nitrogen or nitrogen containing compounds after increasing its expression or activity or further functional homologs of the polypeptide of the invention or the polypeptide used in the method of the invention from other organisms.

[0222] These fragments can then be utilized as hybridization probe for isolating the complete gene sequence. As an alternative, the missing 5′ and 3′ sequences can be isolated by means of RACE-PCR (rapid amplification of cDNA ends). A nucleic acid molecule according to the invention can be amplified using cDNA or, as an alternative, genomic DNA as template and suitable oligonucleotide primers, following standard PCR amplification techniques. The nucleic acid molecule amplified thus can be cloned into a suitable vector and characterized by means of DNA sequence analysis. Oligonucleotides, which correspond to one of the nucleic acid molecules used in the process, can be generated by standard synthesis methods, for example using an automatic DNA synthesizer.

[0223] Nucleic acid molecules which are advantageously for the process according to the invention can be isolated based on their homology to the nucleic acid molecules disclosed herein using the sequences or part thereof as hybridization probe and following standard hybridization techniques under stringent hybridization conditions. In this context, it is possible to use, for example, isolated nucleic acid molecules of at least 15, 20, 25, 30, 35, 40, 50, 60 or more nucleotides, preferably of at least 15, 20 or 25 nucleotides in length which hybridize under stringent conditions with the above-described nucleic acid molecules, in particular with those which encompass a nucleotide sequence of the nucleic acid molecule used in the process of the invention or encoding a protein used in the invention or of the nucleic acid molecule of the invention. Nucleic acid molecules with 30, 50, 100, 250 or more nucleotides may also be used.

[0224] The term “homology” means that the respective nucleic acid molecules or encoded proteins are functionally and/or structurally equivalent. The nucleic acid molecules that are homologous to the nucleic acid molecules described above and that are derivatives of said nucleic acid molecules are, for example, variations of said nucleic acid molecules which represent modifications having the same biological function, in particular encoding proteins with the same or substantially the same biological function. They may be naturally occurring variations, such as sequences from other plant varieties or species, or mutations. These mutations may occur naturally or may be obtained by mutagenesis techniques. The allelic variations may be naturally occurring allelic variants as well as synthetically produced or genetically engineered variants. Structurally equivalents can, for example, be identified by testing the binding of said polypeptide to antibodies or computer based predictions. Structurally equivalents have the similar immunological characteristic, e.g. comprise similar epitopes.

[0225] By “hybridizing” it is meant that such nucleic acid molecules hybridize under conventional hybridization conditions, preferably under stringent conditions such as described by, e.g., Sambrook (Molecular Cloning; A Laboratory Manual, 2nd Edition, Cold Spring Harbor Laboratory Press, Cold Spring Harbor, N.Y. (1989)) or in Current Protocols in Molecular Biology, John Wiley & Sons, N.Y. (1989), 6.3.1-6.3.6.

[0226] According to the invention, DNA as well as RNA molecules of the nucleic acid of the invention can be used as probes. Further, as template for the identification of functional homologues Northern blot assays as well as Southern blot assays can be performed. The Northern blot assay advantageously provides further information about the expressed gene product: e.g. expression pattern, occurrence of processing steps, like splicing and capping, etc. The Southern blot assay provides additional information about the chromosomal localization and organization of the gene encoding the nucleic acid molecule of the invention.

[0227] A preferred, nonlimiting example of stringent hydridization conditions are hybridizations in 6× sodium chloride/sodium citrate (=SSC) at approximately 45° C., followed by one or more wash steps in 0.2×SSC, 0.1% SDS at 50 to 65° C., for example at 50° C., 55° C. or 60° C. The skilled worker knows that these hybridization conditions differ as a function of the type of the nucleic acid and, for example when organic solvents are present, with regard to the temperature and concentration of the buffer. The temperature under “standard hybridization conditions” differs for example as a function of the type of the nucleic acid between 42° C. and 58° C., preferably between 45° C. and 50° C. in an aqueous buffer with a concentration of 0.1×0.5×, 1×, 2×, 3×, 4× or 5×SSC (pH 7.2). If organic solvent(s) is/are present in the abovementioned buffer, for example 50% formamide, the temperature under standard conditions is approximately 40° C., 42° C. or 45° C. The hybridization conditions for DNA:DNA hybrids are preferably for example 0.1×SSC and 20° C., 25° C., 30° C., 35° C., 40° C. or 45° C., preferably between 30° C. and 45° C. The hybridization conditions for DNA:RNA hybrids are preferably for example 0.1×SSC and 30° C., 35° C., 40° C., 45° C., 50° C. or 55° C., preferably between 45° C. and 55° C. The abovementioned hybridization temperatures are determined for example for a nucleic acid approximately 100 bp (=base pairs) in length and a G+C content of 50% in the absence of formamide. The skilled worker knows to determine the hybridization conditions required with the aid of textbooks, for example the ones mentioned above, or from the following textbooks: Sambrook et al., “Molecular Cloning”, Cold Spring Harbor Laboratory, 1989; Hames and Higgins (Ed.) 1985, “Nucleic Acids Hybridization: A Practical Approach”, IRL Press at Oxford University Press, Oxford; Brown (Ed.) 1991, “Essential Molecular Biology: A Practical Approach”, IRL Press at Oxford University Press, Oxford.

[0228] A further example of one such stringent hybridization condition is hybridization at 4×SSC at 65° C., followed by a washing in 0.1×SSC at 65° C. for one hour. Alternatively, an exemplary stringent hybridization condition is in 50% formamide, 4×SSC at 42° C. Further, the conditions during the wash step can be selected from the range of conditions delimited by low-stringency conditions (approximately 2×SSC at 50° C.) and high-stringency conditions (approximately 0.2×SSC at 50° C., preferably at 65° C.) (20×SSC: 0.3M sodium citrate, 3M NaCl, pH 7.0). In addition, the temperature during the wash step can be raised from low-stringency conditions at room temperature, approximately 22° C., to higher-stringency conditions at approximately 65° C. Both of the parameters salt concentration and temperature can be varied simultaneously, or else one of the two parameters can be kept constant while only the other is varied. Denaturants, for example formamide or SDS, may also be employed during the hybridization. In the presence of 50% formamide, hybridization is preferably effected at 42° C. Relevant factors like i) length of treatment, ii) salt conditions, iii) detergent conditions, iv) competitor DNAs, v) temperature and vi) probe selection can be combined case by case so that not all possibilities can be mentioned herein.

[0229] Thus, in a preferred embodiment, Northern blots are prehybridized with Rothi-Hybri-Quick buffer (Roth, Karlsruhe) at 68° C. for 2 h. Hybridization with radioactive labelled probe is done overnight at 68° C. Subsequent washing steps are performed at 68° C. with 1×SSC.

[0230] For Southern blot assays the membrane is prehybridized with Rothi-Hybri-Quick buffer (Roth, Karlsruhe) at 68° C. for 2 h. The hybridization with radioactive labelled probe is conducted over night at 68° C. Subsequently the hybridization buffer is discarded and the filter shortly washed using 2×SSC; 0.1% SDS. After discarding the washing buffer new 2×SSC; 0.1% SDS buffer is added and incubated at 68° C. for 15 minutes. This washing step is performed twice followed by an additional washing step using 1×SSC; 0.1% SDS at 68° C. for 10 min.

[0231] Some further examples of conditions for DNA hybridization (Southern blot assays) and wash step are shown herein below:

1. Hybridization conditions can be selected, for example, from the following conditions:
[0232] a) 4×SSC at 65° C.,
[0233] b) 6×SSC at 45° C.,
[0234] c) 6×SSC, 100 mg/ml denatured fragmented fish sperm DNA at 68° C.,
[0235] d) 6×SSC, 0.5% SDS, 100 mg/ml denatured salmon sperm DNA at 68° C.,
[0236] e) 6×SSC, 0.5% SDS, 100 mg/ml denatured fragmented salmon sperm DNA, 50% formamide at 42° C.,
[0237] f) 50% formamide, 4×SSC at 42° C.,
[0238] g) 50% (vol/vol) formamide, 0.1% bovine serum albumin, 0.1% Ficoll, 0.1% polyvinylpyrrolidone, 50 mM sodium phosphate buffer pH 6.5, 750 mM NaCl, 75 mM sodium citrate at 42° C.,
[0239] h) 2× or 4×SSC at 50° C. (low-stringency condition), or
[0240] i) 30 to 40% formamide, 2× or 4×SSC at 42° C. (low-stringency condition).
   2. Wash steps can be selected, for example, from the following conditions:
[0241] a) 0.015 M NaCl/0.0015 M sodium citrate/0.1% SDS at 50° C.
[0242] b) 0.1×SSC at 65° C.
[0243] c) 0.1×SSC, 0.5% SDS at 68° C.
[0244] d) 0.1×SSC, 0.5% SDS, 50% formamide at 42° C.
[0245] e) 0.2×SSC, 0.1% SDS at 42° C.
[0246] f) 2×SSC at 65° C. (low-stringency condition).

[0247] Polypeptides having above-mentioned activity, i.e. conferring the increase of nitrogen or nitrogen containing compound, derived from other organisms, can be encoded by other DNA sequences which hybridize to a sequences indicated in Table I, columns 5 or 7, preferably of Table I B, columns 5 or 7, under relaxed hybridization conditions and which code on expression for peptides having the nitrogen or nitrogen containing compounds increasing activity.

[0248] Further, some applications have to be performed at low stringency hybridisation conditions, without any consequences for the specificity of the hybridisation. For example, a Southern blot analysis of total DNA could be probed with a nucleic acid molecule of the present invention and washed at low stringency (55° C. in 2×SSPE0,1% SDS). The hybridisation analysis could reveal a simple pattern of only genes encoding polypeptides of the present invention or used in the process of the invention, e.g. having herein-mentioned activity of increasing nitrogen or nitrogen containing compounds. A further example of such low-stringent hybridization conditions is 4×SSC at 50° C. or hybridization with 30 to 40% formamide at 42° C. Such molecules comprise those which are fragments, analogues or derivatives of the polypeptide of the invention or used in the process of the invention and differ, for example, by way of amino acid and/or nucleotide deletion(s), insertion(s), substitution(s), addition(s) and/or recombination(s) or any other modification(s) known in the art either alone or in combination from the above-described amino acid sequences or their underlying nucleotide sequence(s). However, it is preferred to use high stringency hybridisation conditions.

[0249] Hybridization should advantageously be carried out with fragments of at least 5, 10, 15, 20, 25, 30, 35 or 40 bp, advantageously at least 50, 60, 70 or 80 bp, preferably at least 90, 100 or 110 bp. Most preferably are fragments of at least 15, 20, 25 or 30 bp. Preferably are also hybridizations with at least 100 bp or 200, very especially preferably at least 400 bp in length. In an especially preferred embodiment, the hybridization should be carried out with the entire nucleic acid sequence with conditions described above.

[0250] The terms “fragment”, “fragment of a sequence” or “part of a sequence” mean a truncated sequence of the original sequence referred to. The truncated sequence (nucleic acid or protein sequence) can vary widely in length; the minimum size being a sequence of sufficient size to provide a sequence with at least a comparable function and/or activity of the original sequence referred to or hybridising with the nucleic acid molecule of the invention or the nucleic acid molecule used in the method of the invention or used in the process of the invention under stringent conditions, while the maximum size is not critical. In some applications, the maximum size usually is not substantially greater than that required to provide the desired activity and/or function(s) of the original sequence.

[0251] Typically, the truncated amino acid sequence will range from about 5 to about 310 amino acids in length. More typically, however, the sequence will be a maximum of about 250 amino acids in length, preferably a maximum of about 200 or 100 amino acids. It is usually desirable to select sequences of at least about 10, 12 or 15 amino acids, up to a maximum of about 20 or 25 amino acids.

[0252] The term “epitope” relates to specific immunoreactive sites within an antigen, also known as antigenic determinates. These epitopes can be a linear array of monomers in a polymeric composition—such as amino acids in a protein—or consist of or comprise a more complex secondary or tertiary structure. Those of skill will recognize that immunogens (i.e., substances capable of eliciting an immune response) are antigens; however, some antigen, such as haptens, are not immunogens but may be made immunogenic by coupling to a carrier molecule. The term “antigen” includes references to a substance to which an antibody can be generated and/or to which the antibody is specifically immunoreactive.

[0253] In one embodiment the present invention relates to a epitope of the polypeptide of the present invention or used in the process of the present invention and conferring above mentioned activity, preferably conferring an increase in nitrogen or nitrogen containing compounds.

[0254] The term “one or several amino acids” relates to at least one amino acid but not more than that number of amino acids, which would result in a homology of below 50% identity. Preferably, the identity is more than 70% or 80%, more preferred are 85%, 90%, 91%, 92%, 93%, 94% or 95%, even more preferred are 96%, 97%, 98%, or 99% identity.

[0255] Further, the nucleic acid molecule of the invention comprises a nucleic acid molecule, which is a complement of one of the nucleotide sequences of above mentioned nucleic acid molecules or a portion thereof. A nucleic acid molecule which is complementary to one of the nucleotide sequences indicated in Table I, columns 5 or 7, preferably of Table I B, columns 5 or 7, is one which is sufficiently complementary to one of said nucleotide sequences such that it can hybridize to one of said nucleotide sequences thereby forming a stable duplex. Preferably, the hybridisation is performed under stringent hybridization conditions. However, a complement of one of the herein disclosed sequences is preferably a sequence complement thereto according to the base pairing of nucleic acid molecules well known to the skilled person. For example, the bases A and G undergo base pairing with the bases T and U or C, resp. and visa versa. Modifications of the bases can influence the base-pairing partner.

[0256] The nucleic acid molecule of the invention comprises a nucleotide sequence which is at least about 30%, 35%, 40% or 45%, preferably at least about 50%, 55%, 60% or 65%, more preferably at least about 70%, 80%, or 90%, and even more preferably at least about 95%, 97%, 98%, 99% or more homologous to a nucleotide sequence indicated in Table I, columns 5 or 7, preferably of Table I B, columns 5 or 7, or a functional portion thereof and preferably has above mentioned activity, in particular has the-nitrogen or nitrogen containing-compound-increasing activity after increasing its activity or an activity of a product of a gene encoding said sequence or its homologs.

[0257] The nucleic acid molecule of the invention or the nucleic acid molecule used in the method of the invention comprises a nucleotide sequence which hybridises, preferably hybridises under stringent conditions as defined herein, to one of the nucleotide sequences indicated in Table I, columns 5 or 7, preferably of Table I B, columns 5 or 7, or a portion thereof and encodes a protein having above-mentioned activity and as indicated in indicated in Table II, columns 5 or 7, preferably of Table II B, columns 5 or 7, e.g. conferring an increase of nitrogen or nitrogen containing compounds.

[0258] Optionally, the nucleotide sequence, which hybridises to one of the nucleotide sequences indicated in Table I, columns 5 or 7, preferably of Table I B, columns 5 or 7, has further one or more of the activities annotated or known for the a protein as indicated in Table II, column 3.

[0259] Moreover, the nucleic acid molecule of the invention or used in the process of the invention can comprise only a portion of the coding region of one of the sequences indicated in Table I, columns 5 or 7, preferably of Table I B, columns 5 or 7, for example a fragment which can be used as a probe or primer or a fragment encoding a biologically active portion of the polypeptide of the present invention or of a polypeptide used in the process of the present invention, i.e. having above-mentioned activity, e.g. conferring an increased content of nitrogen or nitrogen containing compounds if its activity is increased. The nucleotide sequences determined from the cloning of the present protein-according-to-the-invention-encoding gene allows for the generation of probes and primers designed for use in identifying and/or cloning its homologues in other cell types and organisms. The probe/primer typically comprises substantially purified oligonucleotide. The oligonucleotide typically comprises a region of nucleotide sequence that hybridizes under stringent conditions to at least about 12, 15 preferably about 20 or 25, more preferably about 40, 50 or 75 consecutive nucleotides of a sense strand of one of the sequences indicated in Table I, columns 5 or 7, an anti-sense sequence of one of the sequences indicated in Table I, columns 5 or 7, or naturally occurring mutants thereof. Primers based on a nucleotide sequence of the invention can be used in PCR reactions to clone homologues of the polypeptide of the invention or of the polypeptide used in the process of the invention, e.g. as the primers described in the examples of the present invention, e.g. as shown in the examples. A PCR with the primer pairs indicated in Table III, column 7, will result in a fragment of a polynucleotide sequence as indicated in Table I, columns 5 or 7. Preferred is Table I B, column 7.

[0260] Primer sets are interchangeable. The person skilled in the art knows to combine said primers to result in the desired product, e.g. in a full-length clone or a partial sequence. Probes based on the sequences of the nucleic acid molecule of the invention or used in the process of the present invention can be used to detect transcripts or genomic sequences encoding the same or homologous proteins. The probe can further comprise a label group attached thereto, e.g. the label group can be a radioisotope, a fluorescent compound, an enzyme, or an enzyme co-factor. Such probes can be used as a part of a genomic marker test kit for identifying cells which express an polypeptide of the invention or used in the process of the present invention, such as by measuring a level of an encoding nucleic acid molecule in a sample of cells, e.g., detecting mRNA levels or determining, whether a genomic gene comprising the sequence of the polynucleotide of the invention or used in the processes of the present invention has been mutated or deleted.

[0261] The nucleic acid molecule of the invention or the nucleic acid molecule used in the method of the invention encodes a polypeptide or portion thereof which includes an amino acid sequence which is sufficiently homologous to an amino acid sequence as indicated in Table II, columns 5 or 7, lines 1, 2, 3, 4 and/or 5 such that the protein or portion thereof maintains the ability to participate in the accumlation and/or production of nitrogen or nitrogen containing compounds respectively, in particular a protein content increasing activity as mentioned above or as described in the examples in plants or microorganisms is comprised.

[0262] As used herein, the language “sufficiently homologous” refers to proteins or portions thereof which have amino acid sequences which include a minimum number of identical or equivalent amino acid residues (e.g., an amino acid residue which has a similar side chain as an amino acid residue in one of the sequences of the polypeptide of the present invention) to an amino acid sequence as indicated in Table II, columns 5 or 7, such that the protein or portion thereof is able to participate in the accumulation and/or production of nitrogen or nitrogen containing compounds respectively. In one embodiment, a protein or portion thereof as indicated in Table II, columns 5 or 7, has for example an activity of a polypeptide indicated in Table II, column 3.

[0263] In one embodiment, the nucleic acid molecule of the present invention comprises a nucleic acid that encodes a portion of the protein of the present invention. The protein is at least about 30%, 35%, 40%, 45% or 50%, preferably at least about 55%, 60%, 65% or 70%, and more preferably at least about 75%, 80%, 85%, 90%, 91%, 92%, 93% or 94% and most preferably at least about 95%, 97%, 98%, 99% or more homologous to an entire amino acid sequence as indicated in Table II, columns 5 or 7, and has above-mentioned activity, e.g. conferring preferably the increase of nitrogen or nitrogen containing compounds.

[0264] Portions of proteins encoded by the nucleic acid molecule of the invention or the nucleic acid molecule used in the method of the invention are preferably biologically active, preferably having above-mentioned annotated activity, e.g. conferring a increase of nitrogen or nitrogen containing compounds after increase of activity.

[0265] As mentioned herein, the term “biologically active portion” is intended to include a portion, e.g., a domain/motif, that confers increase of nitrogen or nitrogen containing compounds or has an immunological activity such that it is binds to an antibody binding specifically to the polypeptide of the present invention or a polypeptide used in the process of the present invention for producing nitrogen or nitrogen containing compounds;

[0266] The invention further relates to nucleic acid molecules that differ from one of the nucleotide sequences indicated in Table I, columns 5 or 7, (and portions thereof) due to degeneracy of the genetic code and thus encode a polypeptide of the present invention, in particular a polypeptide having above mentioned activity, e.g. conferring an increase in nitrogen or nitrogen containing compounds in a organism, e.g. as that polypeptides comprising the consensus sequences as indicated in Table IV, column 7, or of the polypeptide as indicated in Table II, columns 5 or 7, or their functional homologues. Advantageously, the nucleic acid molecule of the invention or the nucleic acid molecule used in the method of the invention comprises, or in an other embodiment has, a nucleotide sequence encoding a protein comprising, or in an other embodiment having, a consensus sequences as indicated in Table IV, column 7, or of the polypeptide as indicated in Table II, columns 5 or 7, or the functional homologues. In a still further embodiment, the nucleic acid molecule of the invention or the nucleic acid molecule used in the method of the invention encodes a full length protein which is substantially homologous to an amino acid sequence comprising a consensus sequence as indicated in Table IV, column 7, or of a polypeptide as indicated in Table II, columns 5 or 7, or the functional homologues thereof. However, in a preferred embodiment, the nucleic acid molecule of the present invention does not consist of a sequence as indicated in Table I, columns 5 or 7, preferably as indicated in Table I A, columns 5 or 7. Preferably the nucleic acid molecule of the invention is a functional homologue or identical to a nucleic acid molecule indicated in Table I B, columns 5 or 7.

[0267] In addition, it will be appreciated by those skilled in the art that DNA sequence polymorphisms that lead to changes in the amino acid sequences may exist within a population. Such genetic polymorphism in the gene encoding the polypeptide of the invention or the polypeptide used in the method of the invention or comprising the nucleic acid molecule of the invention or the nucleic acid molecule used in the method of the invention may exist among individuals within a population due to natural variation.

[0268] As used herein, the terms “gene” and “recombinant gene” refer to nucleic acid molecules comprising an open reading frame encoding the polypeptide of the invention or the polypeptide used in the method of the invention or comprising the nucleic acid molecule of the invention or the nucleic acid molecule used in the method of the invention or encoding the polypeptide used in the process of the present invention, preferably from a crop plant or from a microorganism useful for the accumulation and/or production of nitrogen or nitrogen containing compounds respectively, in particular for the production of proteins. Such natural variations can typically result in 1-5% variance in the nucleotide sequence of the gene. Any and all such nucleotide variations and resulting amino acid polymorphisms in genes encoding a polypeptide of the invention or the polypeptide used in the method of the invention or comprising a the nucleic acid molecule of the invention or the nucleic acid molecule used in the method of the invention that are the result of natural variation and that do not alter the functional activity as described are intended to be within the scope of the invention.

[0269] Nucleic acid molecules corresponding to natural variants homologues of a nucleic acid molecule of the invention or the nucleic acid molecule used in the method of the invention, which can also be a cDNA, can be isolated based on their homology to the nucleic acid molecules disclosed herein using the nucleic acid molecule of the invention or the nucleic acid molecule used in the method of the invention, or a portion thereof, as a hybridization probe according to standard hybridization techniques under stringent hybridization conditions.

[0270] Accordingly, in another embodiment, a nucleic acid molecule of the invention or the nucleic acid molecule used in the method of the invention is at least 15, 20, 25 or 30 nucleotides in length. Preferably, it hybridizes under stringent conditions to a nucleic acid molecule comprising a nucleotide sequence of the nucleic acid molecule of the present invention or used in the process of the present invention, e.g. comprising a sequence as indicated in Table I, columns 5 or 7. The nucleic acid molecule is preferably at least 20, 30, 50, 100, 250 or more nucleotides in length.

[0271] The term “hybridizes under stringent conditions” is defined above. In one embodiment, the term “hybridizes under stringent conditions” is intended to describe conditions for hybridization and washing under which nucleotide sequences at least 30%, 40%, 50% or 65% identical to each other typically remain hybridized to each other. Preferably, the conditions are such that sequences at least about 70%, more preferably at least about 75% or 80%, and even more preferably at least about 85%, 90% or 95% or more identical to each other typically remain hybridized to each other.

[0272] Preferably, the nucleic acid molecule of the invention or the nucleic acid molecule used in the method of the invention that hybridizes under stringent conditions to a sequence as indicated in Table I, columns 5 or 7, lines 1, 2, 3, 4 and/or 5 corresponds to a naturally-occurring nucleic acid molecule of the invention. As used herein, a “naturally-occurring” nucleic acid molecule refers to an RNA or DNA molecule having a nucleotide sequence that occurs in nature (e.g., encodes a natural protein). Preferably, the nucleic acid molecule encodes a natural protein having above-mentioned activity, e.g. conferring nitrogen or nitrogen containing compounds increase after increasing the expression or activity thereof or the activity of a protein of the invention or used in the process of the invention.

[0273] In addition to naturally-occurring variants of the sequences of the polypeptide or nucleic acid molecule of the invention as well as of the polypeptide or nucleic acid molecule used in the process of the invention that may exist in the population, the skilled artisan will further appreciate that changes can be introduced by mutation into a nucleotide sequence of the nucleic acid molecule encoding the polypeptide of the invention or used in the process of the present invention, thereby leading to changes in the amino acid sequence of the encoded said polypeptide, without altering the functional ability of the polypeptide, preferably not decreasing said activity.

[0274] For example, nucleotide substitutions leading to amino acid substitutions at “non-essential” amino acid residues can be made in a sequence of the nucleic acid molecule of the invention or used in the process of the invention, e.g. as indicated in Table I, columns 5 or 7, lines 1, 2, 3 4 and/or 5.

[0275] A “non-essential” amino acid residue is a residue that can be altered from the wild-type sequence of one without altering the activity of said polypeptide, whereas an “essential” amino acid residue is required for an activity as mentioned above, e.g. leading to an increase in nitrogen or nitrogen containing compounds in an organism after an increase of activity of the polypeptide. Other amino acid residues, however, (e.g., those that are not conserved or only semi-conserved in the domain having said activity) may not be essential for activity and thus are likely to be amenable to alteration without altering said activity.

[0276] Further, a person skilled in the art knows that the codon usage between organism can differ. Therefore, he may adapt the codon usage in the nucleic acid molecule of the present invention to the usage of the organism in which the polynucleotide or polypeptide is expressed.

[0277] Accordingly, the invention relates to nucleic acid molecules encoding a polypeptide having above-mentioned activity, e.g. conferring an increase in nitrogen or nitrogen containing compounds in an organisms or parts thereof that contain changes in amino acid residues that are not essential for said activity. Such polypeptides differ in amino acid sequence from a sequence contained in a sequence as indicated in Table II, columns 5 or 7, preferably of Table II B, column 7, yet retain said activity described herein. The nucleic acid molecule can comprise a nucleotide sequence encoding a polypeptide, wherein the polypeptide comprises an amino acid sequence at least about 50% identical to an amino acid sequence as indicated in Table II, columns 5 or 7, preferably of Table II B, column 7, and is capable of participation in the increased accumulation and/or production of nitrogen or nitrogen containing compounds respectively after increasing its activity, e.g. its expression. Preferably, the protein encoded by the nucleic acid molecule is at least about 60% identical to a sequence as indicated in Table II, columns 5 or 7, lines 1, 2, 3 4 and/or 5, preferably of Table II B, column 7, more preferably at least about 70% identical to one of the sequences as indicated in Table II, columns 5 or 7, preferably of Table II B, column 7, even more preferably at least about 80%, 90%, or 95% homologous to a sequence as indicated in Table II, columns 5 or 7, preferably of Table II B, column 7, and most preferably at least about 96%, 97%, 98%, or 99% identical to the sequence as indicated in Table II, columns 5 or 7, preferably of Table II B, column 7.

[0278] To determine the percentage homology (=identity) of two amino acid sequences or of two nucleic acid molecules, the sequences are written one underneath the other for an optimal comparison (for example gaps may be inserted into the sequence of a protein or of a nucleic acid in order to generate an optimal alignment with the other protein or the other nucleic acid).

[0279] The amino acid residues or nucleic acid molecules at the corresponding amino acid positions or nucleotide positions are then compared. If a position in one sequence is occupied by the same amino acid residue or the same nucleic acid molecule as the corresponding position in the other sequence, the molecules are homologous at this position (i.e. amino acid or nucleic acid “homology” as used in the present context corresponds to amino acid or nucleic acid “identity”. The percentage homology between the two sequences is a function of the number of identical positions shared by the sequences (i.e. % homology=number of identical positions/total number of positions×100). The terms “homology” and “identity” are thus to be considered as synonyms.

[0280] For the determination of the percentage homology (=identity) of two or more amino acids or of two or more nucleotide sequences several computer software programs have been developed. The homology of two or more sequences can be calculated with for example the software fasta, which presently has been used in the version fasta 3 (W. R. Pearson and D. J. Lipman (1988), Improved Tools for Biological Sequence Comparison. PNAS 85:2444-2448; W. R. Pearson (1990) Rapid and Sensitive Sequence Comparison with FASTP and FASTA, Methods in Enzymology 183:63-98. Another useful program for the calculation of homologies of different sequences is the standard blast program, which is included in the Biomax pedant software (Biomax, Munich, Federal Republic of Germany). This leads unfortunately sometimes to suboptimal results since blast does not always include complete sequences of the subject and the query. Nevertheless as this program is very efficient it can be used for the comparison of a huge number of sequences. The following settings are typically used for such a comparisons of sequences:

−p Program Name [String]; −d Database [String]; default=nr; −i Query File [File In]; default=stdin; −e Expectation value (E) [Real]; default=10.0; −m alignment view options: 0=pairwise; 1=query-anchored showing identities; 2=query-anchored no identities; 3=flat query-anchored, show identities; 4=flat query-anchored, no identities; 5=query-anchored no identities and blunt ends; 6=flat query-anchored, no identities and blunt ends; 7=XML Blast output; 8=tabular; 9 tabular with comment lines [Integer]; default=0; −o BLAST report Output File [File Out] Optional; default=stdout; −F Filter query sequence (DUST with blastn, SEG with others) [String]; default=T; −G Cost to open a gap (zero invokes default behavior) [Integer]; default=0; −E Cost to extend a gap (zero invokes default behavior) [Integer]; default=0; −X X dropoff value for gapped alignment (in bits) (zero invokes default behavior); blastn 30, megablast 20, tblastx 0, all others 15 [Integer]; default=0; −I Show GI's in deflines [T/F]; default=F; −q Penalty for a nucleotide mismatch (blastn only) [Integer]; default=−3; −r Reward for a nucleotide match (blastn only) [Integer]; default=1; −v Number of database sequences to show one-line descriptions for (V) [Integer]; default=500; −b Number of database sequence to show alignments for (B) [Integer]; default=250; −f Threshold for extending hits, default if zero; blastp 11, blastn 0, blastx 12, tblastn 13; tblastx 13, megablast 0 [Integer]; default=0; −g Perform gapped alignment (not available with tblastx) [T/F]; default=T; −Q Query Genetic code to use [Integer]; default=1; −D DB Genetic code (for tblast[nx] only) [Integer]; default=1; −a Number of processors to use [Integer]; default=1; −O SeqAlign file [File Out] Optional; −J Believe the query defline [T/F]; default=F; −M Matrix [String]; default=BLOSUM62; −W Word size, default if zero (blastn 11, megablast 28, all others 3) [Integer]; default=0; −z Effective length of the database (use zero for the real size) [Real]; default=0; −K Number of best hits from a region to keep (off by default, if used a value of 100 is recommended) [Integer]; default=0; −P 0 for multiple hit, 1 for single hit [Integer]; default=0; −Y Effective length of the search space (use zero for the real size) [Real]; default=0; −S Query strands to search against database (for blast[nx], and tblastx); 3 is both, 1 is top, 2 is bottom [Integer]; default=3; −T Produce HTML output [T/F]; default=F; −I Restrict search of database to list of GI's [String] Optional; −U Use lower case filtering of FASTA sequence [T/F] Optional; default=F; −y X dropoff value for ungapped extensions in bits (0.0 invokes default behavior); blastn 20, megablast 10, all others 7 [Real]; default=0.0; −Z X dropoff value for final gapped alignment in bits (0.0 invokes default behavior); blastn/megablast 50, tblastx 0, all others 25 [Integer]; default=0; −R PSI-TBLASTN checkpoint file [File In] Optional; −n MegaBlast search [T/F]; default=F; −L Location on query sequence [String] Optional; −A Multiple Hits window size, default if zero (blastn/megablast 0, all others 40 [Integer]; default=0; −w Frame shift penalty (OOF algorithm for blastx) [Integer]; default=0; −t Length of the largest intron allowed in tblastn for linking HSPs (0 disables linking) [Integer]; default=0.

[0281] Results of high quality are reached by using the algorithm of Needleman and Wunsch or Smith and Waterman. Therefore programs based on said algorithms are preferred. Advantageously the comparisons of sequences can be done with the program PileUp (J. Mol. Evolution., 25, 351-360,1987, Higgins et al., CABIOS, 5 1989: 151-153) or preferably with the programs Gap and BestFit, which are respectively based on the algorithms of Needleman and Wunsch [J. Mol. Biol. 48; 443-453 (1970)] and Smith and Waterman [Adv. Appl. Math. 2; 482-489 (1981)]. Both programs are part of the GCG software-package [Genetics Computer Group, 575 Science Drive, Madison, Wis., USA 53711 (1991); Altschul et al. (1997) Nucleic Acids Res. 25:3389 et seq.]. Therefore preferably the calculations to determine the percentages of sequence homology are done with the program Gap over the whole range of the sequences. The following standard adjustments for the comparison of nucleic acid sequences were used: gap weight: 50, length weight: 3, average match: 10.000, average mismatch: 0.000.

[0282] For example a sequence which has a 80% homology with sequence SEQ ID NO: 1 at the nucleic acid level is understood as meaning a sequence which, upon comparison with the sequence SEQ ID NO: 1 by the above Gap program algorithm with the above parameter set, has a 80% homology.

[0283] In the state of the art, homology between two polypeptides is also understood as meaning the identity of the amino acid sequence over in each case the entire sequence length which is calculated by comparison with the aid of the program algorithm GAP (Wisconsin Package Version 10.0, University of Wisconsin, Genetics Computer Group (GCG), Madison, USA), setting the following parameters:

| | | | |
|---|---|---|---|
| Gap weight: | 8 | Length weight: | 2 |
| Average match: | 2,912 | Average mismatch: | −2,003 |

[0284] For example a sequence which has a 80% homology with sequence SEQ ID NO: 2 at the protein level is understood as meaning a sequence which, upon comparison with the sequence SEQ ID NO: 2 by the above program algorithm with the above parameter set, has a 80% homology.

[0285] Functional equivalents derived from one of the polypeptides as indicated in Table II, columns 5 or 7, according to the invention by substitution, insertion or deletion have at least 30%, 35%, 40%, 45% or 50%, preferably at least 55%, 60%, 65% or 70% by preference at least 80%, especially preferably at least 85% or 90%, 91%, 92%, 93% or 94%, very especially preferably at least 95%, 97%, 98% or 99% homology with one of the polypeptides as indicated in Table II, columns 5 or 7, according to the invention and are distinguished by essentially the same properties as a polypeptide as indicated in Table II, columns 5 or 7.

[0286] Functional equivalents derived from a nucleic acid sequence as indicated in Table I, columns 5 or 7, preferably of Table I B, column 7, lines 1, 2, 3, 4 and/or 5 according to the invention by substitution, insertion or deletion have at least 30%, 35%, 40%, 45% or 50%, preferably at least 55%, 60%, 65% or 70% by preference at least 80%, especially preferably at least 85% or 90%, 91%, 92%, 93% or 94%, very especially preferably at least 95%, 97%, 98% or 99% homology with one of a polypeptide as indicated in Table II, columns 5 or 7, according to the invention and encode polypeptides having essentially the same properties as a polypeptide as indicated in Table II, columns 5 or 7.

[0287] “Essentially the same properties” of a functional equivalent is above all understood as meaning that the functional equivalent has above mentioned activity, e.g. conferring an increase in nitrogen or nitrogen containing compounds amount while increasing the amount of protein, activity or function of said functional equivalent in an organism, e.g. a microorganism, a plant or plant or animal tissue, plant or animal cells or a part of the same, for example the plastids

[0288] A nucleic acid molecule encoding a homologous to a protein sequence of as indicated in Table II, columns 5 or 7 preferably of Table II B, column 7, can be created by introducing one or more nucleotide substitutions, additions or deletions into a nucleotide sequence of the nucleic acid molecule of the present invention, in particular as indicated in Table I, columns 5 or 7, such that one or more amino acid substitutions, additions or deletions are introduced into the encoded protein. Mutations can be introduced into the encoding sequences for example into sequences as indicated in Table I, columns 5 or 7, by standard techniques, such as site-directed mutagenesis and PCR-mediated mutagenesis.

[0289] Preferably, conservative amino acid substitutions are made at one or more predicted non-essential amino acid residues. A “conservative amino acid substitution” is one in which the amino acid residue is replaced with an amino acid residue having a similar side chain. Families of amino acid residues having similar side chains have been defined in the art. These families include amino acids with basic side chains (e.g., lysine, arginine, histidine), acidic side chains (e.g., aspartic acid, glutamic acid), uncharged polar side chains (e.g., glycine, asparagine, glutamine, serine, threonine, tyrosine, cysteine), nonpolar side chains (e.g., alanine, valine, leucine, isoleucine, proline, phenylalanine, methionine, tryptophan), beta-branched side chains (e.g., threonine, valine, isoleucine) and aromatic side chains (e.g., tyrosine, phenylalanine, tryptophan, histidine).

[0290] Thus, a predicted nonessential amino acid residue in a polypeptide of the invention or a polypeptide used in the process of the invention is preferably replaced with another amino acid residue from the same family. Alternatively, in another embodiment, mutations can be introduced randomly along all or part of a coding sequence of a nucleic acid molecule of the invention or used in the process of the invention, such as by saturation mutagenesis, and the resultant mutants can be screened for activity described herein to identify mutants that retain or even have increased above mentioned activity, e.g. conferring an increase in content of nitrogen or nitrogen containing compounds.

[0291] Following mutagenesis of one of the sequences shown herein, the encoded protein can be expressed recombinantly and the activity of the protein can be determined using, for example, assays described herein (see Examples).

[0292] The highest homology of the nucleic acid molecule used in the process according to the invention can be found for generally accessible databases entries by Gap search.

[0293] Those databases, which must be mentioned, in particular in this context are general gene databases such as the EMBL database (Stoesser G. et al., Nucleic Acids Res 2001, Vol. 29, 17-21), the GenBank database (Benson D. A. et al., Nucleic Acids Res 2000, Vol. 28, 15-18), or the PIR database (Barker W. C. et al., Nucleic Acids Res. 1999, Vol. 27, 39-43). It is furthermore possible to use organism-specific gene databases for determining advantageous sequences, in the case of yeast for example advantageously the SGD database (Cherry J. M. et al., Nucleic Acids Res. 1998, Vol. 26, 73-80) or the MIPS database (Mewes H. W. et al., Nucleic Acids Res. 1999, Vol. 27, 44-48), in the case of E. coli the GenProtEC database (http://web.bham.ac.uk/bcm4ght6/res.html), and in the case of Arabidopsis the TAIR-database (Huala, E. et al., Nucleic Acids Res. 2001 Vol. 29(1), 102-5) or the MIPS database.

[0294] Homologues of the nucleic acid sequences used, with a sequence as indicated in Table I, columns 5 or 7, preferably of Table I B, column 7, or of the nucleic acid sequences derived from a sequences as indicated in Table II, columns 5 or 7, lines 1, 2, 3, 4 and/or 5, preferably of Table II B, column 7, comprise also allelic variants with at least approximately 30%, 35%, 40% or 45% homology, by preference at least approximately 50%, 60% or 70%, more preferably at least approximately 90%, 91%, 92%, 93%, 94% or 95% and even more preferably at least approximately 96%, 97%, 98%, 99% or more homology with one of the nucleotide sequences shown or the abovementioned derived nucleic acid sequences or their homologues, derivatives or analogues or parts of these. Allelic variants encompass in particular functional variants which can be obtained by deletion, insertion or substitution of nucleotides from the sequences shown, preferably from a sequence as indicated in Table I, columns 5 or 7, or from the derived nucleic acid sequences, the intention being, however, that the enzyme activity or the biological activity of the resulting proteins synthesized is advantageously retained or increased.

[0295] In one embodiment of the present invention, the nucleic acid molecule of the invention or used in the process of the invention comprises one or more sequences as indicated in Table I, columns 5 or 7 preferably of Table I B, column 7. In one embodiment, it is preferred that the nucleic acid molecule comprises as little as possible other nucleotide sequences not shown in any one of sequences as indicated in Table I, columns 5 or 7, preferably of Table I B, column 7. In one embodiment, the nucleic acid molecule comprises less than 500, 400, 300, 200, 100, 90, 80, 70, 60, 50 or 40 further nucleotides. In a further embodiment, the nucleic acid molecule comprises less than 30, 20 or 10 further nucleotides. In one embodiment, a nucleic acid molecule used in the process of the invention is identical to a sequences as indicated in Table I, columns 5 or 7, preferably of Table I B, column 7.

[0296] Also preferred is that one or more nucleic acid molecule(s) used in the process of the invention encode a polypeptide comprising a sequence selected from the group as indicated in Table II, columns 5 or 7, preferably of Table II B, column 7, lines 1, 2, 3, 4 and/or 5. In one embodiment, the nucleic acid molecule encodes less than 150, 130, 100, 80, 60, 50, 40 or 30 further amino acids. In a further embodiment, the encoded polypeptide comprises less than 20, 15, 10, 9, 8, 7, 6 or 5 further amino acids. In one embodiment, the encoded polypeptide used in the process of the invention is identical to the sequences as indicated in Table II, columns 5 or 7, preferably of Table II B, column 7.

[0297] In one embodiment, the nucleic acid molecule of the invention or used in the process encodes a polypeptide comprising a sequence as indicated in Table II, columns 5 or 7, preferably of Table II B, column 7, comprises less than 100 further nucleotides. In a further embodiment, said nucleic acid molecule comprises less than 30 further nucleotides. In one embodiment, the nucleic acid molecule used in the process is identical to a coding sequence encoding a sequences as indicated in Table II, columns 5 or 7, preferably of Table II B, column 7.

[0298] Polypeptides (=proteins), which still have the essential enzymatic activity of the polypeptide of the present invention conferring an increase of nitrogen or nitrogen containing compounds i.e. whose activity is essentially not reduced, are polypeptides with at least 10% or 20%, by preference 30% or 40%, especially preferably 50% or 60%, very especially preferably 80% or 90 or more of the wild type biological activity or enzyme activity, advantageously, the activity is essentially not reduced in comparison with the activity of a polypeptide as indicated in Table II, columns 5 or 7, preferably compared to a sequence as indicated in Table II, column 3 and 5, and expressed under identical conditions.

[0299] In one embodiment, the polypeptide of the invention is a homolog consisting of or comprising the sequence as indicated in Table II B, columns 7.

[0300] Homologues of a sequence as indicated in Table I, columns 5 or 7, or of a derived sequence as indicated in Table II, columns 5 or 7, also mean truncated sequences, cDNA, single-stranded DNA or RNA of the coding and noncoding DNA sequence. Homologues of said sequences are also understood as meaning derivatives, which comprise noncoding regions such as, for example, UTRs, terminators, enhancers or promoter variants. The promoters upstream of the nucleotide sequences stated can be modified by one or more nucleotide substitution(s), insertion(s) and/or deletion(s) without, however, interfering with the functionality or activity either of the promoters, the open reading frame (=ORF) or with the 3′-regulatory region such as terminators or other 3′regulatory regions, which are far away from the ORF. It is furthermore possible that the activity of the promoters is increased by modification of their sequence, or that they are replaced completely by more active promoters, even promoters from heterologous organisms. Appropriate promoters are known to the person skilled in the art and are mentioned herein below.

[0301] In a further embodiment, the process according to the present invention comprises the following steps:
[0302] (a) selecting an organism or a part thereof expressing the polypeptide of this invention in the cytsol and/or in an organelle such as a plastid or mitochondria;
[0303] (b) mutagenizing the selected organism or the part thereof;
[0304] (c) comparing the activity or the expression level of said polypeptide in the mutagenized organism or the part thereof with the activity or the expression of said polypeptide in the selected organisms or the part thereof;
[0305] (d) selecting the mutagenized organisms or parts thereof, which comprise an increased activity or expression level of said polypeptide compared to the selected organism (a) or the part thereof;
[0306] (e) optionally, growing and cultivating the organisms or the parts thereof:

[0307] Advantageously the selected organisms are mutagenized according to the invention. According to the invention mutagenesis is any change of the genetic information in the genome of an organism, that means any structural or compositional change in the nucleic acid preferably DNA of an organism that is not caused by normal segregation or genetic recombination processes. Such mutations may occur spontaneously, or may be induced by mutagens as described below. Such change can be induced either randomly or selectively. In both cases the genetic information of the organism is modified. In general this lead to the situation that the activity of the gene product of the relevant genes inside the cells or inside the organism is increased.

[0308] In case of the specific or so called site directed mutagenesis a distinct gene is mutated and thereby its activity and/or the activity or the encoded gene product is repressed, reduced or increased, preferably increased. In the event of a random mutagenesis one or more genes are mutated by chance and their activities and/or the activities of their gene products are repressed, reduced or increased, preferably increased.

[0309] For the purpose of a mutagenesis of a huge population of organisms, such population can be transformed with a DNA construct, which is useful for the activation of as much as possible genes of an organism, preferably all genes. For example the construct can contain a strong promoter or one or more enhancers, which are capable of transcriptionally activate genes in the vicinity of their integration side. With this method it is possible to statistically mutagenize, e.g. activate nearly all genes of an organism by the random integration of an activation construct. Afterwards the skilled worker can identify those mutagenized lines in which a gene of the invention has been activated, which in turns leads to the desired increase in nitrogen or nitrogen containing compounds.

[0310] The genes of the invention can also be activated by mutagenesis, either of regulatory or coding regions. In the event of a random mutagenesis a huge number of organisms are treated with a mutagenic agent. The amount of said agent and the intensity of the treatment will be chosen in such a manner that statistically nearly every gene is mutated once. The process for the random mutagenesis as well as the respective agens is well known by the skilled person. Such methods are disclosed for example by A. M. van Harten [(1998), “Mutation breeding: theory and practical applications”, Cambridge University Press, Cambridge, UK], E Friedberg, G Walker, W Siede [(1995), “DNA Repair and Mutagenesis”, Blackwell Publishing], or K. Sankaranarayanan, J. M. Gentile, L. R. Ferguson [(2000), “Protocols in Mutagenesis”, Elsevier Health Sciences]. As the skilled worker knows the spontaneous mutation rate in the cells of an organism is very low and that a large number of chemical, physical or biological agents are available for the mutagenesis of organisms. These agents are named as mutagens or mutagenic agents. As mentioned before three different kinds of mutagens (chemical, physical or biological agents) are available.

[0311] There are different classes of chemical mutagens, which can be separated by their mode of action. For example base analogues such as 5-bromouracil, 2-amino purin. Other chemical mutagens are interacting with the DNA such as sulphuric acid, nitrous acid, hydroxylamine; or other alkylating agents such as monofunctional agents like ethyl methanesulfonate, dimethylsulfate, methyl methanesulfonate), bifunctional like dichloroethyl sulphide, Mitomycin, Nitrosoguanidine—dialkylnitrosamine, N-Nitrosoguanidin derivatives, N-alkyl-N-nitro-N-nitroso-guanidine-), ntercalating dyes like Acridine, ethidium bromide).

[0312] Physical mutagens are for example ionizing irradiation (X ray), UV irradiation. Different forms of irradiation are available and they are strong mutagens. Two main classes of irradiation can be distinguished: a) non-ionizing irradiation such as UV light or ionizing irradiation such as X ray. Biological mutagens are for example transposable elements for example IS elements such as IS100, transposons such as Tn5, Tn10, Tn916 or Tn1000 or phages like Mu^{amplac}, P1, T5, λplac etc. Methods for introducing this phage DNA into the appropriate microorganism are well known to the skilled worker (see Microbiology, Third Edition, Eds. Davis, B. D., Dulbecco, R., Eisen, H. N. and Ginsberg, H. S., Harper International Edition, 1980). The common procedure of a transposon mutagenesis is the insertion of a transposable element within a gene or nearby for example in the promotor or terminator region and thereby leading to a loss of the gene function. Procedures to localize the transposon within the genome of the organisms are well known by a person skilled in the art.

[0313] Preferably a chemical or biochemical procedure is used for the mutagenesis of the organisms. A preferred chemical method is the mutagenesis with N-methyl-N-nitro-nitrosoguanidine.

[0314] Other biological method are disclosed by Spee et al. (Nucleic Acids Research, Vol. 21, No. 3,1993: 777-778). Spee et al. teaches a PCR method using dITP for the random mutagenesis. This method described by Spee et al. was further improved by Rellos et al. (Protein Expr. Purif., 5, 1994: 270-277). The use of an in vitro recombination technique for molecular mutagenesis is described by Stemmer (Proc. Natl. Acad. Sci. USA, Vol. 91,1994: 10747-10751). Moore et al. (Nature Biotechnology Vol. 14,1996: 458-467) describe the combination of the PCR and recombination methods for increasing the enzymatic activity of an esterase toward a para-nitrobenzyl ester. Another route to the mutagenesis of enzymes is described by Greener et al. in Methods in Molecular Biology (Vol. 57,1996: 375-385). Greener et al. use the specific Escherichia coli strain XL1-Red to generate Escherichia coli mutants which have increased antibiotic resistance.

[0315] In one embodiment, the protein according to the invention or the nucleic acid molecule characterized herein originates from a eukaryotic or prokaryotic organism such as a non-human animal, a plant, a microorganism such as a fungi, a yeast, an alga, a diatom or a bacterium. Nucleic acid molecules, which advantageously can be used in the process of the invention originate from yeasts, for example the family Saccharomycetaceae, in particular the genus Saccharomyces, or yeast genera such as Candida, Hansenula, Pichia, Yarrowia, Rhodotorula or Schizosaccharomyces and the especially advantageous from the species Saccharomyces cerevisiae.

[0316] In one embodiment, nucleic acid molecules, which advantageously can be used in the process of the invention originate from bacteria, for example from Proteobacteria, in particular from Gammaproteobacteria, more preferred from Enterobacteriales, e.g. from the family Enterobacteriaceae, particularly from genera Escherichia, Salmonella, Klebsiella, advantageously form the species Escherichia coli K12.

[0317] If, in the process according to the invention, plants are selected as the donor organism, this plant may, in principle, be in any phylogenetic relation of the recipient plant. Donor and recipient plant may belong to the same family, genus, species, variety or line, resulting in an increasing homology between the nucleic acids to be integrated and corresponding parts of the genome of the recipient plant. This also applies analogously to microorganisms as donor and recipient organism.

[0318] It might also be advantageously to use nuclei acids molecules from very distinct species, since these might exhibit reduced sensitivity against endogenous regulatory mechanisms and such sequences might not be recognized by endogenous silencing mechanisms.

[0319] Accordingly, one embodiment of the application relates to the use of nucleic acid molecules in the process of the invention from plants, e.g. crop plants, e.g. from: B. napus; Glycine max; sunflower, rice, cotton, linseed or maize or their homologues.

[0320] Accordingly, in one embodiment, the invention relates to a nucleic acid molecule which comprises a nucleic acid molecule selected from the group consisting of:
[0321] a) nucleic acid molecule encoding a polypeptide selected from the group as shown in table II; preferably table II B, columns 5 and 7 or a fragment thereof, and which confers enhanced nitrogen assimilation, accumulation and/or utilization in a photosynthetic organism or a part thereof
[0322] b) nucleic acid molecule comprising of a nucleic acid molecule selected from the group as shown in table I, preferably table I B columns 5 and 7 and which confers enhanced nitrogen assimilation, accumulation and/or utilization in a photosynthetic organism or a part thereof;
[0323] c) nucleic acid molecule whose sequence can be deduced from a polypeptide sequence encoded by a nucleic acid molecule of (a) or (b) as a result of the degeneracy of the genetic code and which confers enhanced nitrogen assimilation, accumulation and/or utilization in a photosynthetic organism or a part thereof;
[0324] d) nucleic acid molecule which encodes a polypeptide which has at least 50% identity with the amino acid sequence of the polypeptide encoded by the nucleic acid molecule of (a) to (c) and which confers enhanced nitrogen assimilation, accumulation and/or utilization in a photosynthetic organism or a part thereof;
[0325] e) nucleic acid molecule which hybidizes with a nucleic acid molecule of (a) to (c) under stringent hybridisation conditions and which confers enhanced nitrogen assimilation, accumulation and/or utilization in a photosynthetic organism or a part thereof;
[0326] f) nucleic acid molecule which encompasses a nucleic acid molecule which is obtained by amplifying nucleic acid molecules from a cDNA library or a genomic library using the primers or primer pairs as shown in table III, column 7 and which confers enhanced nitrogen assimilation, accumulation and/or utilization in a photosynthetic organism or a part thereof;
[0327] g) nucleic acid molecule encoding a polypeptide which is isolated with the aid of monoclonal antibodies against a polypeptide encoded by one of the nucleic acid molecules of (a) to (f) and which confers enhanced nitrogen assimilation, accumulation and/or utilization in a photosynthetic organism or a part thereof;
[0328] h) nucleic acid molecule encoding a polypeptide comprising a consensus as shown in table IV, column 7 and which confers enhanced nitrogen assimilation, accumulation and/or utilization in a photosynthetic organism or a part thereof; and
[0329] i) nucleic acid molecule which is obtainable by screening a suitable nucleic acid library under stringent hybridization conditions with a probe comprising one of the sequences of the nucleic acid molecule of (a) to (k) or with a fragment thereof having at least 15 nt, preferably 20 nt, 30 nt, 50 nt, 100 nt, 200 nt or 500 nt of the nucleic acid molecule characterized in (a) to (k) and which confers enhanced nitrogen assimilation, accumulation and/or utilization in a photosynthetic organism or a part thereof,
   or which encompasses a sequence which is complementary thereto; whereby, preferably, the nucleic acid molecule according to (a) to (l) distinguishes over the sequence indicated in Table IA or I B, columns 5 or 7, by one or more nucleotides. In one embodiment, the nucleic acid molecule does not consist of the sequence shown and indicated in Table I A or I B, columns 5 or 7. In one embodiment, the nucleic acid molecule is less than 100%, 99,999%, 99,99%, 99,9% or 99% identical to a sequence indicated in Table I A or I B, columns 5 or 7. In another embodiment, the nucleic acid molecule does not encode a polypeptide of a sequence indicated in Table II A or II B, columns 5 or 7. In an other embodiment, the nucleic acid molecule of the present invention is at least 30%, 40%, 50%, or 60% identical and less than 100%, 99.999%, 99.99%, 99.9% or 99% identical to a sequence indicated in Table I A or I B, columns 5 or 7. In a further embodiment the nucleic acid molecule does not encode a polypeptide sequence as indicated in Table II A or II B, columns 5 or 7. Accordingly, in one embodiment, the nucleic acid molecule of the invention differs at least in one or more residues from a nucleic acid molecule indicated in Table I A or I B, columns 5 or 7. Accordingly, in one embodiment, the nucleic acid molecule of the present invention encodes a polypeptide, which differs at least in one or more amino acids from a polypeptide indicated in Table II A or I B, columns 5 or 7. Accordingly, in one embodiment, the protein encoded by a sequences of a nucleic acid according to (a) to (l) does not consist of a sequence as indicated in Table II A or II B, columns 5 or 7. In a further embodiment, the protein of the present invention is at least 30%, 40%, 50%, or 60% identical to a protein sequence indicated in Table II A or II B, columns 5 or 7 and less than 100%, preferably less than 99.999%, 99.99% or 99.9%, more preferably less than 99%, 98%, 97%, 96% or 95% identical to a sequence as indicated in Table II A or II B, columns 5 or 7.

[0330] The nucleic acid sequences used in the process are advantageously introduced in a nucleic acid construct, preferably an expression cassette which makes possible the expression of the nucleic acid molecules in an organism, advantageously a plant or a microorganism. The nucleic acid sequences shown in table I A or IB columns 5 or 7 application no. 2 and/or application no. 3 are preferably introduced in a nucleic acid construct, which additionally contains a nucleic acid sequence encoding a plastidial targeting sequence, in such a way that a fusion protein is encoded, which upon translation directs the polypeptide encoded by a nucleic acid sequences shown in table I A or IB columns 5 or 7 into the plastidial compartment. The person skilled in the art is familiar with the design of such nucleic acids constructs. Accordingly, the invention also relates to an nucleic acid construct, preferably to an expression construct, comprising the nucleic acid molecule of the present invention functionally linked to one or more regulatory elements or signals. Accordingly, the invention also relates to a nucleic acid construct, preferably to an expression construct, comprising the nucleic acid molecule of the present invention, preferably a sequence as shown in table I A or IB columns 5 or 7 application no. 2 and/or application no. 3 functionally linked to a plastidal targeting sequence.

[0331] As described herein, the nucleic acid construct can also comprise further genes, which are to be introduced into the organisms or cells. It is possible and advantageous to introduce into, and express in, the host organisms regulatory genes such as genes for inductors, repressors or enzymes, which, owing to their enzymatic activity, engage in the regulation of one or more genes of a biosynthetic pathway. These genes can be of heterologous or homologous origin. Moreover, further biosynthesis genes may advantageously be present, or else these genes may be located on one or more further nucleic acid constructs. Genes, which are advantageously employed as biosynthesis genes are genes of the amino acid metabolism, of glycolysis, of the tricarboxylic acid metabolism or their combinations. As described herein, regulator sequences or factors can have a positive effect on preferably the gene expression of the genes introduced, thus increasing it. Thus, an enhancement of the regulator elements may advantageously take place at the transcriptional level by using strong transcription signals such as promoters and/or enhancers. In addition, however, an enhancement of translation is also possible, for example by increasing mRNA stability or by inserting a translation enhancer sequence.

[0332] In principle, the nucleic acid construct can comprise the herein described regulator sequences and further sequences relevant for the expression of the comprised genes. Thus, the nucleic acid construct of the invention can be used as expression cassette and thus can be used directly for introduction into the plant, or else they may be introduced into a vector. Accordingly in one embodiment the nucleic acid construct is an expression cassette comprising a microorganism promoter or a microorganism terminator or both. In another embodiment the expression cassette encompasses a plant promoter or a plant terminator or both. In another embodiment the expression cassette encompasses a plant plastidial targeting sequence.

[0333] Accordingly, in one embodiment, the process according to the invention comprises the following steps:
[0334] (a) introducing of a nucleic acid construct comprising the nucleic acid molecule of the invention or used in the process of the invention or encoding the polypeptide of the present invention or used in the process of the invention; or
[0335] (b) introducing of a nucleic acid molecule, including regulatory sequences or factors, which expression increases the expression of the nucleic acid molecule of the invention or used in the process of the invention or encoding the polypeptide of the present invention or used in the process of the invention; in a cell, or an organism or a part thereof, preferably in a plant, plant cell or a microorganism, and
[0336] (c) expressing of the gene product encoded by the nucleic acid construct or the nucleic acid molecule mentioned under (a) or (b) in the cell, in the cytsol or in an organelle such as a plastid or mitochondria or both, preferably in plastids or preferably in cytosol or the organism.

[0337] After the introduction and expression of the nucleic acid construct the transgenic organism or cell is advantageously cultured and subsequently harvested. The transgenic organism or cell may be a prokaryotic or eukaryotic organism such as a microorganism, a plant cell, a plant tissue, preferably a crop plant, or a part thereof.

[0338] To introduce a nucleic acid molecule into a nucleic acid construct, e.g. as part of an expression cassette, the codogenic gene segment is advantageously subjected to an amplification and ligation reaction in the manner known by a skilled person. It is preferred to follow a procedure similar to the protocol for the Pfu DNA polymerase or a Pfu/Taq DNA polymerase mixture. The primers are selected according to the sequence to be amplified. The primers should expediently be chosen in such a way that the amplificate comprise the codogenic sequence from the start to the stop codon. After the amplification, the amplificate is expediently analyzed. For example, the analysis may consider quality and quantity and be carried out following separation by gel electrophoresis. Thereafter, the amplificate can be purified following a standard protocol (for example Qiagen). An aliquot of the purified amplificate is then available for the subsequent cloning step. Suitable cloning vectors are generally known to the skilled worker.

[0339] They include, in particular, vectors which are capable of replication in easy to handle cloning systems like as bacterial yeast or insect cell based (e.g. baculovirus expression) systems, that is to say especially vectors which ensure efficient cloning in E. coli, and which make possible the stable transformation of plants. Vectors, which must be mentioned in particular are various binary and cointegrated vector systems which are suitable for the T-DNA-mediated transformation. Such vector systems are generally characterized in that they contain at least the vir genes, which are required for the Agrobacterium-mediated transformation, and the T-DNA border sequences.

[0340] In general, vector systems preferably also comprise further cis-regulatory regions such as promoters and terminators and/or selection markers by means of which suitably transformed organisms can be identified. While vir genes and T-DNA sequences are located on the same vector in the case of cointegrated vector systems, binary systems are based on at least two vectors, one of which bears vir genes, but no T-DNA, while a second one bears T-DNA, but no vir gene. Owing to this fact, the last-mentioned vectors are relatively small, easy to manipulate and capable of replication in E. coli and in Agrobacterium. These binary vectors include vectors from the series pBIB-HYG, pPZP, pBecks, pGreen. Those which are preferably used in accordance with the invention are Bin19, pBI101, pBinAR, pGPTV and pCAMBIA. An overview of binary vectors and their use is given by Hellens et al, Trends in Plant Science (2000) 5, 446-451.

[0341] For a vector preparation, vectors may first be linearized using restriction endonuclease(s) and then be modified enzymatically in a suitable manner. Thereafter, the vector is purified, and an aliquot is employed in the cloning step. In the cloning step, the enzyme-cleaved and, if required, purified amplificate is cloned together with similarly prepared vector fragments, using ligase. In this context, a specific nucleic acid construct, or vector or plasmid construct, may have one or else more codogenic gene segments. The codogenic gene segments in these constructs are preferably linked operably to regulatory sequences. The regulatory sequences include, in particular, plant sequences like the above-described promoters and terminators and eventually a targeting sequence between the codogenic segment and the promotor. The constructs can advantageously be propagated stably in microorganisms, in particular Escherichia coli and/or Agrobacterium tumefaciens, under selective conditions and enable the transfer of heterologous DNA into plants or other microorganisms. In accordance with a particular embodiment, the constructs are based on binary vectors (overview of a binary vector: Hellens et al., 2000). As a rule, they contain prokaryotic regulatory sequences, such as replication origin and selection markers, for the multiplication in microorganisms such as Escherichia coli and Agrobacterium tumefaciens. Vectors can further contain agrobacterial T-DNA sequences for the transfer of DNA into plant genomes or other eukaryotic regulatory sequences for transfer into other eukaryotic cells, e.g. Saccharomyces sp. or other prokaryotic regulatory sequences for the transfer into other prokaryotic cells, e.g. Corynebacterium sp. or Bacillus sp. For the transformation of plants, the right border sequence, which comprises approximately 25 base pairs, of the total agrobacterial T-DNA sequence is advantageously included. Usually, the plant transformation vector constructs according to the invention contain T-DNA sequences both from the right and from the left border region, which contain expedient recognition sites for site-specific acting enzymes which, in turn, are encoded by some of the vir genes.

[0342] Suitable host organisms are known to the skilled worker. Advantageous organisms are described further above in the present application. They include in particular eukaryotes or eubacteria, e.g. prokaryotes or archae bacteria. Advantageously host organisms are microorganisms selected from the group consisting of Actinomycetaceae, Bacillaceae, Brevibacteriaceae, Corynebacteriaceae, Enterobacteriacae, Gordoniaceae, Micrococcaceae, Mycobacteriaceae, Nocardiaceae, Pseudomonaceae, Rhizobiaceae, Streptomycetaceae, Chaetomiaceae, Choanephoraceae, Cryptococcaceae, Cunninghamellaceae, Demetiaceae, Moniliaceae, Mortierellaceae, Mucoraceae, Pythiaceae, Sacharomycetaceae, Saprolegniaceae, Schizosacharomycetaceae, Sodariaceae, Sporobolomycetaceae, Tuberculariaceae, Adelotheciaceae, Dinophyceae, Ditrichaceae and Prasinophyceae. Preferably are unicellular, microorganisms, e.g. fungi, bacteria or protoza, such as fungi like the genus Claviceps or Aspergillus or gram-positive bacteria such as the genera Bacillus, Corynebacterium, Micrococcus, Brevibacterium, Rhodococcus, Nocardia, Caseobacter or Arthrobacter or gram-negative bacteria such as the genera Escherichia, Flavobacterium or Salmonella, or yeasts such as the genera Rhodotorula, Hansenula, Pichia, Yerrowia, Saccharomyces, Schizosaccharomyces or Candida.

[0343] Host organisms which are especially advantageously selected in the process according to the invention are microorganisms selected from the group of the genera and species consisting of Hansenula anomala, Candida utilis, Claviceps purpurea, Bacillus circulans, Bacillus subtilis, Bacillus sp., Brevibacterium albidum, Brevibacterium album, Brevibacterium cerinum, Brevibacterium flavum, Brevibacterium glutamigenes, Brevibacterium iodinum, Brevibacterium ketoglutamicum, Brevibacterium lactofermentum, Brevibacterium linens, Brevibacterium roseum, Brevibacterium saccharolyticum, Brevibacterium sp., Corynebacterium acetoacidophilum, Corynebacterium acetoglutamicum, Corynebacterium ammoniagenes, Corynebacterium glutamicum (=Micrococcus glutamicum), Corynebacterium melassecola, Corynebacterium sp. or Escherichia coli, specifically Escherichia coli K12 and its described strains.

[0344] Advantageously preferred in accordance with the invention are host organisms of the genus Agrobacterium tumefaciens or plants. Preferred plants are selected from among the families Aceraceae, Anacardiaceae, Apiaceae, Asteraceae, Apiaceae, Betulaceae, Boraginaceae, Brassicaceae, Bromeliaceae, Cactaceae, Caricaceae, Caryophyllaceae, Cannabaceae, Convolvulaceae, Chenopodiaceae, Elaeagnaceae, Geraniaceae, Gramineae, Juglandaceae, Lauraceae, Leguminosae, Linaceae, Cucurbitaceae, Cyperaceae, Euphorbiaceae, Fabaceae, Malvaceae, Nymphaeaceae, Papaveraceae, Rosaceae, Salicaceae, Solanaceae, Arecaceae, Iridaceae, Liliaceae, Orchidaceae, Gentianaceae, Labiaceae, Magnoliaceae, Ranunculaceae, Carifolaceae, Rubiaceae, Scrophulariaceae, Ericaceae, Polygonaceae, Violaceae, Juncaceae, Poaceae, perennial grass, fodder crops, vegetables and ornamentals.

[0345] Especially preferred are plants selected from the groups of the families Apiaceae, Asteraceae, Brassicaceae, Cucurbitaceae, Fabaceae, Papaveraceae, Rosaceae, Solanaceae, Liliaceae or Poaceae. Especially advantageous are, in particular, crop plants. Accordingly, an advantageous plant preferably belongs to the group of the genus peanut, oilseed rape, canola, sunflower, safflower, olive, sesame, hazelnut, almond, avocado, bay, pumpkin/squash, linseed, soya, pistachio, borage, maize, wheat, rye, oats, sorghum and millet, triticale, rice, cotton, barley, cassaya, potato, sugarbeet, fodder beet, egg plant, and perennial grasses and forage plants, oil palm, vegetables (brassicas, root vegetables, tuber vegetables, pod vegetables, fruiting vegetables, onion vegetables, leafy vegetables and stem vegetables), buckwheat, Jerusalem artichoke, broad bean, vetches, lentil, alfalfa, dwarf bean, lupin, clover and lucerne.

[0346] In order to introduce, into a plant, the nucleic acid molecule of the invention or used in the process according to the invention, it has proved advantageous first to transfer them into an intermediate host, for example a bacterium or a eukaryotic unicellular cell. The transformation into E. coli, which can be carried out in a manner known per se, for example by means of heat shock or electroporation, has proved itself expedient in this context. Thus, the transformed E. coli colonies can be analysed for their cloning efficiency. This can be carried out with the aid of a PCR. Here, not only the identity, but also the integrity, of the plasmid construct can be verified with the aid of a defined colony number by subjecting an aliquot of the colonies to said PCR. As a rule, universal primers which are derived from vector sequences are used for this purpose, it being possible, for example, for a forward primer to be arranged upstream of the start ATG and a reverse primer to be arranged downstream of the stop codon of the codogenic gene segment. The amplificates are separated by electrophoresis and assessed with regard to quantity and quality.

[0347] The nucleic acid constructs, which are optionally verified, are subsequently used for the transformation of the plants or other hosts, e.g. other eukaryotic cells or other prokaryotic cells. To this end, it may first be necessary to obtain the constructs from the intermediate host. For example, the constructs may be obtained as plasmids from bacterial hosts by a method similar to conventional plasmid isolation.

[0348] The nucleic acid molecule of the invention or used in the process according to the invention can also be introduced into modified viral vectors like baculovirus vectors for expression in insect cells or plant viral vectors like tobacco mosaic virus or potato virus X-based vectors. Approaches leading to the expression of proteins from the modified viral genome including the nucleic acid molecule of the invention or used in the process according to the invention involve for example the inoculation of tobacco plants with infectious RNA transcribed in vitro from a cDNA copy of the recombinant viral genome. Another approach utilizes the transfection of whole plants from wounds inoculated with Agrobacterium tumefaciens containing cDNA copies of recombinant plus-sense RNA viruses. Different vectors and virus are known to the skilled worker for expression in different target e.g. production plants.

[0349] A large number of methods for the transformation of plants are known. Since, in accordance with the invention, a stable integration of heterologous DNA into the genome of plants is advantageous, the T-DNA-mediated transformation has proved expedient in particular. For this purpose, it is first necessary to transform suitable vehicles, in particular agrobacteria, with a codogenic gene segment or the corresponding plasmid construct comprising the nucleic acid molecule of the invention. This can be carried out in a manner known per se. For example, said nucleic acid construct of the invention, or said expression construct or said plasmid construct, which has been generated in accordance with what has been detailed above, can be transformed into competent agrobacteria by means of electroporation or heat shock. In principle, one must differentiate between the formation of cointegrated vectors on the one hand and the transformation with binary vectors on the other hand. In the case of the first alternative, the constructs, which comprise the codogenic gene segment or the nucleic acid molecule of the invention or the nucleic acid molecule used in the method of the invention have no T-DNA sequences, but the formation of the cointegrated vectors or constructs takes place in the agrobacteria by homologous recombination of the construct with T-DNA. The T-DNA is present in the agrobacteria in the form of Ti or Ri plasmids in which exogenous DNA has expediently replaced the oncogenes. If binary vectors are used, they can be transferred to agrobacteria either by bacterial conjugation or by direct transfer. These agrobacteria expediently already comprise the vector bearing the vir genes (currently referred to as helper Ti(Ri) plasmid).

[0350] One or more markers may expediently also be used together with the nucleic acid construct, or the vector of the invention and, if plants or plant cells shall be transformed together with the T-DNA, with the aid of which the isolation or selection of transformed organisms, such as agrobacteria or transformed plant cells, is possible. These marker genes enable the identification of a successful transfer of the nucleic acid molecules according to the invention via a series of different principles, for example via visual identification with the aid of fluorescence, luminescence or in the wavelength range of light which is discernible for the human eye, by a resistance to herbicides or antibiotics, via what are known as nutritive markers (auxotrophism markers) or antinutritive markers, via enzyme assays or via phytohormones. Examples of such markers which may be mentioned are GFP (=green fluorescent protein); the luciferin/luceferase system, the -galactosidase with its colored substrates, for example X-Gal, the herbicide resistances to, for example, imidazolinone, glyphosate, phosphinothricin or sulfonylurea, the antibiotic resistances to, for example, bleomycin, hygromycin, streptomycin, kanamycin, tetracyclin, chloramphenicol, ampicillin, gentamycin, geneticin (G418), spectinomycin or blasticidin, to mention only a few, nutritive markers such as the utilization of mannose or xylose, or antinutritive markers such as the resistance to 2-deoxyglucose or D-aminoacids. This list is a small number of possible markers. The skilled worker is very familiar with such markers. Different markers are preferred, depending on the organism and the selection method.

[0351] As a rule, it is desired that the plant nucleic acid constructs are flanked by T-DNA at one or both sides of the codogenic gene segment. This is particularly useful when bacteria of the species Agrobacterium tumefaciens or Agrobacterium rhizogenes are used for the transformation. A method, which is preferred in accordance with the invention, is the transformation with the aid of Agrobacterium tumefaciens. However, biolistic methods may also be used advantageously for introducing the sequences in the process according to the invention, and the introduction by means of PEG is also possible. The transformed agrobacteria can be grown in the manner known per se and are thus available for the expedient transformation of the plants. The plants or plant parts to be transformed are grown or provided in the customary manner. The transformed agrobacteria are subsequently allowed to act on the plants or plant parts until a sufficient transformation rate is reached. Allowing the agrobacteria to act on the plants or plant parts can take different forms. For example, a culture of morphogenic plant cells or tissue may be used. After the T-DNA transfer, the bacteria are, as a rule, eliminated by antibiotics, and the regeneration of plant tissue is induced. This is done in particular using suitable plant hormones in order to initially induce callus formation and then to promote shoot development.

[0352] The transfer of foreign genes into the genome of a plant is called transformation. In doing this the methods described for the transformation and regeneration of plants from plant tissues or plant cells are utilized for transient or stable transformation. An advantageous transformation method is the transformation in planta. To this end, it is possible, for example, to allow the agrobacteria to act on plant seeds or to inoculate the plant meristem with agrobacteria. It has proved particularly expedient in accordance with the invention to allow a suspension of transformed agrobacteria to act on the intact plant or at least the flower primordia. The plant is subsequently grown on until the seeds of the treated plant are obtained (Clough and Bent, Plant J. (1998) 16, 735-743). To select transformed plants, the plant material obtained in the transformation is, as a rule, subjected to selective conditions so that transformed plants can be distinguished from untransformed plants. For example, the seeds obtained in the above-described manner can be planted and, after an initial growing period, subjected to a suitable selection by spraying. A further possibility consists in growing the seeds, if appropriate after sterilization, on agar plates using a suitable selection agent so that only the transformed seeds can grow into plants. Further advantageous transformation methods, in particular for plants, are known to the skilled worker and are described hereinbelow.

[0353] Further advantageous and suitable methods are protoplast transformation by poly(ethylene glycol)-induced DNA uptake, the “biolistic” method using the gene cannon—referred to as the particle bombardment method, electroporation, the incubation of dry embryos in DNA solution, microinjection and gene transfer mediated by Agrobacterium. Said methods are described by way of example in B. Jenes et al., Techniques for Gene Transfer, in: Transgenic Plants, Vol. 1, Engineering and Utilization, eds. S. D. Kung and R. Wu, Academic Press (1993) 128-143 and in Potrykus Annu. Rev. Plant Physiol. Plant Molec. Biol. 42 (1991) 205-225). The nucleic acids or the construct to be expressed is preferably cloned into a vector, which is suitable for transforming Agrobacterium tumefaciens, for example pBin19 (Bevan et al., Nucl. Acids Res. 12 (1984) 8711). Agrobacteria transformed by such a vector can then be used in known manner for the transformation of plants, in particular of crop plants such as by way of example tobacco plants, for example by bathing bruised leaves or chopped leaves in an agrobacterial solution and then culturing them in suitable media. The transformation of plants by means of Agrobacterium tumefaciens is described, for example, by Höfgen and Willmitzer in Nucl. Acid Res. (1988) 16, 9877 or is known inter alia from F. F. White, Vectors for Gene Transfer in Higher Plants; in Transgenic Plants, Vol. 1, Engineering and Utilization, eds. S. D. Kung and R. Wu, Academic Press, 1993, pp. 15-38.

[0354] The abovementioned nucleic acid molecules can be cloned into the nucleic acid constructs or vectors according to the invention in combination together with further genes, or else different genes are introduced by transforming several nucleic acid constructs or vectors (including plasmids) into a host cell, advantageously into a plant cell or a microorganisms.

[0355] In addition to a sequence indicated in Table I, columns 5 or 7 or its derivatives, it is advantageous additionally to express and/or mutate further genes in the organisms. Especially advantageously, additionally at least one further gene of the amino acid biosynthetic pathway such as for L-lysine, L-threonine and/or L-methionine is expressed in the organisms such as plants or microorganisms. It is also possible that the regulation of the natural genes has been modified advantageously so that the gene and/or its gene product is no longer subject to the regulatory mechanisms which exist in the organisms. This leads to an increased synthesis of the amino acids desired since, for example, feedback regulations no longer exist to the same extent or not at all. In addition it might be advantageously to combine a sequence as indicated in Table I, columns 5 or 7, with genes which generally support or enhances to growth or yield of the target organismen, for example genes which lead to faster growth rate of microorganisms or genes which produces stress-, pathogen, or herbicide resistant plants.

[0356] In a further advantageous embodiment of the process of the invention, the organisms used in the process are those in which simultaneously at least one of the aforementioned genes or one of the aforementioned nucleic acids is mutated so that the activity of the corresponding proteins is influenced by metabolites to a smaller extent compared with the unmutated proteins, or not at all, and that in particular the accumlation or production according to the invention of nitrogen or nitrogen containing compounds respectively is not impaired, or so that their specific enzymatic activity is increased. Less influence means in this connection that the regulation of the enzymic activity is less by at least 10%, advantageously at least 20, 30 or 40%, particularly advantageously by at least 50, 60, 70, 80 or 90%, compared with the starting organism, and thus the activity of the enzyme is increased by these figures mentioned compared with the starting organism. An increase in the enzymatic activity means an enzymatic activity which is increased by at least 10%, advantageously at least 20, 30, 40 or 50%, particularly advantageously by at least 60, 70, 80, 90, 100, 200, 300, 500 or 1000%, compared with the starting organism. This leads to an enhanced nitrogen assimilation, accumulation and/or utilization the organism.

[0357] In a further advantageous embodiment of the process of the invention, the organisms used in the process are those in which simultaneously a N-containing compound degrading protein is attenuated, in particular by reducing the rate of expression of the corresponding gene.

[0358] In another embodiment of the process of the invention, the organisms used in the process are those in which simultaneously at least one of the aforementioned nucleic acids or of the aforementioned genes is mutated in such a way that the enzymatic or biological activity of the corresponding protein is partially reduced or completely blocked. A reduction in the enzymatic or biological activity means an enzymatic activity, which is reduced by at least 10%, advantageously at least 20, 30 or 40%, particularly advantageously by at least 50, 60 or 70%, preferably more, compared with the starting organism.

[0359] If it is intended to transform the host cell, in particular the plant cell, with several constructs or vectors, the marker of a preceding transformation must be removed or a further marker employed in a following transformation. The markers can be removed from the host cell, in particular the plant cell, as described hereinbelow via methods with which the skilled worker is familiar. In particular plants without a marker, in particular without resistance to antibiotics, are an especially preferred embodiment of the present invention.

[0360] In the process according to the invention, the nucleic acid sequences used in the process according to the invention are advantageously linked operably to one or more regulatory signals in order to increase gene expression. These regulatory sequences are intended to enable the specific expression of the genes and the expression of protein. Depending on the host organism for example plant or microorganism, this may mean, for example, that the gene is expressed and/or overexpressed after induction only, or that it is expressed and/or overexpressed constitutively. These regulatory sequences are, for example, sequences to which the inductors or repressors bind and which thus regulate the expression of the nucleic acid. In addition to these novel regulatory sequences, or instead of these sequences, the natural regulation of these sequences may still be present before the actual structural genes and, if appropriate, may have been genetically modified so that the natural regulation has been switched off and gene expression has been increased. However, the nucleic acid construct of the invention suitable as expression cassette (=expression construct=gene construct) can also be simpler in construction, that is to say no additional regulatory signals have been inserted before the nucleic acid sequence or its derivatives, and the natural promoter together with its regulation has not been removed. Instead, the natural regulatory sequence has been mutated in such a way that regulation no longer takes place and/or gene expression is increased. These modified promoters can also be introduced on their own before the natural gene in the form of part sequences (=promoter with parts of the nucleic acid sequences according to the invention) in order to increase the activity. Moreover, the gene construct can advantageously also comprise one or more of what are known as enhancer sequences in operable linkage with the promoter, and these enable an increased expression of the nucleic acid sequence. Also, it is possible to insert additional advantageous sequences at the 3′ end of the DNA sequences, such as, for example, further regulatory elements or terminators.

[0361] The nucleic acid molecules, which encode proteins according to the invention and nucleic acid molecules, which encode other polypeptides may be present in one nucleic acid construct or vector or in several ones. Advantageously, only one copy of the nucleic acid molecule of the invention or the nucleic acid molecule used in the method of the invention or its encoding genes is present in the nucleic acid construct or vector. Several vectors or nucleic acid construct or vector can be expressed together in the host organism. The nucleic acid molecule or the nucleic acid construct or vector according to the invention can be inserted in a vector and be present in the cell in a free form. If a stable transformation is preferred, a vector is used, which is stably duplicated over several generations or which is else be inserted into the genome. In the case of plants, integration into the plastid genome or, in particular, into the nuclear genome may have taken place. For the insertion of more than one gene in the host genome the genes to be expressed are present together in one gene construct, for example in above-described vectors bearing a plurality of genes.

[0362] As a rule, regulatory sequences for the expression rate of a gene are located upstream (5′), within, and/or downstream (3′) relative to to the coding sequence of the nucleic acid molecule of the invention or the nucleic acid molecule used in the method of the invention or another codogenic gene segment. They control in particular transcription and/or translation and/or the transcript stability. The expression level is dependent on the conjunction of further cellular regulatory systems, such as the protein biosynthesis and degradation systems of the cell.

[0363] Regulatory sequences include transcription and translation regulating sequences or signals, e.g. sequences located upstream (5′), which concern in particular the regulation of transcription or translation initiation, such as promoters or start codons, and sequences located downstream (3′), which concern in particular the regulation of transcription or translation termination and transcript stability, such as polyadenylation signals or stop codons. Regulatory sequences can also be present in transcribed coding regions as well in transcribed non-coding regions, e.g. in introns, as for example splicing sites. Promoters for the regulation of expression of the nucleic acid molecule according to the invention in a cell and which can be employed are, in principle, all those which are capable of stimulating the transcription of genes in the organisms in question, such as microorganisms or plants. Suitable promoters, which are functional in these organisms are generally known. They may take the form of constitutive or inducible promoters. Suitable promoters can enable the development- and/or tissue-specific expression in multi-celled eukaryotes; thus, leaf-, root-, flower-, seed-, stomata-, tuber- or fruit-specific promoters may advantageously be used in plants.

[0364] The regulatory sequences or factors can, as described above, have a positive effect on, the expression of the genes introduced, thus increasing their expression. Thus, an enhancement of the expression can advantageously take place at the transcriptional level by using strong transcription signals such as strong promoters and/or strong enhancers. In addition, enhancement of expression on the translational level is also possible, for example by introducing translation enhancer sequences, e.g., the enhancer e.g. improving the ribosomal binding to the transcript, or by increasing the stability of the mRNA, e.g. by replacing the 3′UTR coding region by a region encoding a 3′UTR known as conferring an high stability of the transcript or by stabilization of the transcript through the elimination of transcript instability, so that the mRNA molecule is translated more often than the wild type. For example in plants AU-rich elements (AREs) and DST (downstream) elements destabilized transcripts. Mutagenesis studies have demonstrated that residues within two of the conserved domains, the ATAGAT and the GTA regions, are necessary for instability function. Therefore removal or mutation of such elements would obviously lead to more stable transcripts, higher transcript rates and higher protein activity. Translation enhancers are also the “overdrive sequence”, which comprises the tobacco mosaic virus 5′-untranslated leader sequence and which increases the protein/RNA ratio (Gallie et al., 1987, Nucl. Acids Research 15:8693-8711)

[0365] Enhancers are generally defined as cis active elements, which can stimulate gene transcription independent of position and orientation. Different enhancers have been identified in plants, which can either stimulate transcription constitutively or tissue or stimuli specific. Well known examples for constitutive enhancers are the enhancer from the 35S promoter (Odell et al., 1985, Nature 313:810-812) or the ocs enhancer (Fromm et al., 1989, Plant Cell 1: 977:984) Another examples are the G-Box motif tetramer which confers high-level constitutive expression in dicot and monocot plants (Ishige et al., 1999, Plant Journal, 18, 443-448) or the petE, a A/T-rich sequence which act as quantitative enhancers of gene expression in transgenic tobacco and potato plants (Sandhu et al., 1998; Plant Mol. Biol. 37(5):885-96). Beside that, a large variety of cis-active elements have been described which contribute to specific expression pattern, like organ specific expression or induced expression in response to biotic or abiotic stress. Examples are elements which provide pathogen or wound-induced expression (Rushton 2002, Plant Cell, 14, 749-762) or guard cell-specific expression (Plesch, 2001, Plant Journal 28, 455-464).

[0366] Advantageous regulatory sequences for the expression of the nucleic acid molecule according to the invention in microorganisms are present for example in promoters such as the cos, tac, rha, trp, tet, trp-tet, lpp, lac, lpp-lac, lacl^{q-}, T7, T5, T3, gal, trc, ara, SP6, λ-P_{R} or λ-P_{L} promoter, which are advantageously used in Gram-negative bacteria. Further advantageous regulatory sequences are present for example in the Gram-positive promoters amy, dnak, xylS and SPO2, in the yeast or fungal promoters ADC1, MFα, AC, P-60, UASH, MCB, PHO, CYC1, GAPDH, TEF, rp28, ADH. Promoters, which are particularly advantageous, are constitutive, tissue or compartment specific and inducible promoters. In general, “promoter” is understood as meaning, in the present context, a regulatory sequence in a nucleic acid molecule, which mediates the expression of a coding sequence segment of a nucleic acid molecule. In general, the promoter is located upstream to the coding sequence segment. Some elements, for example expression-enhancing elements such as enhancer may, however, also be located downstream or even in the transcribed region.

[0367] In principle, it is possible to use natural promoters together with their regulatory sequences, such as those mentioned above, for the novel process. It is also possible advantageously to use synthetic promoters, either additionally or alone, in particular when they mediate seed-specific expression such as described in, for example, WO 99/16890.

[0368] The expression of the nucleic acid molecules used in the process may be desired alone or in combination with other genes or nucleic acids. Multiple nucleic acid molecules conferring the expression of advantageous genes can be introduced via the simultaneous transformation of several individual suitable nucleic acid constructs, i.e. expression constructs, or, preferably, by combining several expression cassettes on one construct. It is also possible to transform several vectors with in each case several expression cassettes stepwise into the recipient organisms.

[0369] As described above the transcription of the genes introduced should advantageously be terminated by suitable terminators at the 3′ end of the biosynthesis genes introduced (behind the stop codon). A terminator, which may be used for this purpose is, for example, the OCS1 terminator, the nos3 terminator or the 35S terminator. As is the case with the promoters, different terminator sequences should be used for each gene. Terminators, which are useful in microorganism are for example the fimA terminator, txn terminator or trp terminator. Such terminators can be rho-dependent or rho-independent.

[0370] Different plant promoters such as, for example, the USP, the LegB4-, the DC3 promoter or the ubiquitin promoter from parsley or other herein mentioned promoter and different terminators may advantageously be used in the nucleic acid construct.

[0371] In order to ensure the stable integration, into the transgenic plant, of nucleic acid molecules used in the process according to the invention in combination with further biosynthesis genes over a plurality of generations, each of the coding regions used in the process should be expressed under the control of its own, preferably unique, promoter since repeating sequence motifs may lead to recombination events or to silencing or, in plants, to instability of the T-DNA.

[0372] The nucleic acid construct is advantageously constructed in such a way that a promoter is followed by a suitable cleavage site for insertion of the nucleic acid to be expressed, advantageously in a polylinker, followed, if appropriate, by a terminator located behind the polylinker. If appropriate, this order is repeated several times so that several genes are combined in one construct and thus can be introduced into the transgenic plant in order to be expressed. The sequence is advantageously repeated up to three times. For the expression, the nucleic acid sequences are inserted via the suitable cleavage site, for example in the polylinker behind the promoter. It is advantageous for each nucleic acid sequence to have its own promoter and, if appropriate, its own terminator, as mentioned above. However, it is also possible to insert several nucleic acid sequences behind a promoter and, if appropriate, before a terminator if a polycistronic transcription is possible in the host or target cells. In this context, the insertion site, or the sequence of the nucleic acid molecules inserted, in the nucleic acid construct is not decisive, that is to say a nucleic acid molecule can be inserted in the first or last position in the cassette without this having a substantial effect on the expression. However, it is also possible to use only one promoter type in the construct. However, this may lead to undesired recombination events or silencing effects, as said.

[0373] Accordingly, in a preferred embodiment, the nucleic acid construct according to the invention confers expression of the nucleic acid molecule of the invention or the nucleic acid molecule used in the method of the invention, and, optionally further genes, in a plant and comprises one or more plant regulatory elements. Said nucleic acid construct according to the invention advantageously encompasses a plant promoter or a plant terminator or a plant promoter and a plant terminator.

[0374] A “plant” promoter comprises regulatory elements, which mediate the expression of a coding sequence segment in plant cells. Accordingly, a plant promoter need not be of plant origin, but may originate from viruses or microorganisms, in particular for example from viruses which attack plant cells.

[0375] The plant promoter can also originates from a plant cell, e.g. from the plant, which is transformed with the nucleic acid construct or vector as described herein.

[0376] This also applies to other “plant” regulatory signals, for example in “plant” terminators.

[0377] A nucleic acid construct suitable for plant expression preferably comprises regulatory elements which are capable of controlling the expression of genes in plant cells and which are operably linked so that each sequence can fulfill its function. Accordingly, the nucleic acid construct can also comprise transcription terminators. Examples for transcriptional termination are polyadenylation signals. Preferred polyadenylation signals are those which originate from Agrobacterium tumefaciens T-DNA, such as the gene 3 of the Ti plasmid pTiACH5, which is known as octopine synthase (Gielen et al., EMBO J. 3 (1984) 835 et seq.) or functional equivalents thereof, but all the other terminators which are functionally active in plants are also suitable.

[0378] The nucleic acid construct suitable for plant expression preferably also comprises other operably linked regulatory elements such as translation enhancers, for example the overdrive sequence, which comprises the tobacco mosaic virus 5′-untranslated leader sequence, which increases the protein/RNA ratio (Gallie et al., 1987, Nucl. Acids Research 15:8693-8711).

[0379] Other preferred sequences for use in operable linkage in gene expression constructs are targeting sequences, which are required for targeting the gene product into specific cell compartments (for a review, see Kermode, Crit. Rev. Plant Sci. 15, 4 (1996) 285-423 and references cited therein), for example into the vacuole, the nucleus, all types of plastids, such as amyloplasts, chloroplasts, chromoplasts, the extracellular space, the mitochondria, the endoplasmic reticulum, elaioplasts, peroxisomes, glycosomes, and other compartments of cells or extracellular. Sequences, which must be mentioned in this context are, in particular, the signal-peptide- or transit-peptide-encoding sequences which are known per se. For example, plastid-transit-peptide-encoding sequences enable the targeting of the expression product into the plastids of a plant cell. Targeting sequences are also known for eukaryotic and to a lower extent for prokaryotic organisms and can advantageously be operable linked with the nucleic acid molecule of the present invention to achieve an expression in one of said compartments or extracellular. Especially preferred is the operable linkage of the nucleic acid sequences shown in table I A or IB columns 5 or 7 application no. 2 or no. 3 with a targeting sequence for the plastidial compartment. For expression in plants, the nucleic acid molecule must, as described above, be linked operably to or comprise a suitable promoter which expresses the gene at the right point in time and in a cell- or tissue-specific manner. Usable promoters are constitutive promoters (Benfey et al., EMBO J. 8 (1989) 2195-2202), such as those which originate from plant viruses, such as 35S CAMV (Franck et al., Cell 21 (1980) 285-294), 19S CaMV (see also U.S. Pat. No. 5,352,605 and WO 84/02913), 34S FMV (Sanger et al., Plant. Mol. Biol., 14, 1990: 433-443), the parsley ubiquitin promoter, or plant promoters such as the Rubisco small subunit promoter described in U.S. Pat. No. 4,962,028 or the plant promoters PRP1 [Ward et al., Plant. Mol. Biol. 22 (1993)], SSU, PGEL1, OCS [Leisner (1988) Proc Natl Acad Sci USA 85(5):2553-2557], lib4, usp, mas [Comai (1990) Plant Mol Biol 15 (3):373-381], STLS1, ScBV (Schenk (1999) Plant Mol Biol 39(6):1221-1230), B33, SAD1 or SAD2 (flax promoters, Jain et al., Crop Science, 39 (6), 1999: 1696-1701) or nos [Shaw et al. (1984) Nucleic Acids Res. 12(20):7831-7846]. Stable, constitutive expression of the proteins according to the invention a plant can be advantageous. However, inducible expression of the polypeptide of the invention or the polypeptide used in the method of the invention is advantageous, if a late expression before the harvest is of advantage, as metabolic manipulation may lead to a plant growth retardation.

[0380] The expression of plant genes can also be facilitated as described above via a chemical inducible promoter (for a review, see Gatz 1997, Annu. Rev. Plant Physiol. Plant Mol. Biol., 48:89-108). Chemically inducible promoters are particularly suitable when it is desired to express the gene in a time-specific manner. Examples of such promoters are a salicylic acid inducible promoter (WO 95/19443), and abscisic acid-inducible promoter (EP 335 528), a tetracyclin-inducible promoter (Gatz et al. (1992) Plant J. 2, 397-404), a cyclohexanol- or ethanol-inducible promoter (WO 93/21334) or others as described herein.

[0381] Other suitable promoters are those which react to biotic or abiotic stress conditions, for example the pathogen-induced PRP1 gene promoter (Ward et al., Plant. Mol. Biol. 22 (1993) 361-366), the tomato heat-inducible hsp80 promoter (U.S. Pat. No. 5,187,267), the potato chill-inducible alpha-amylase promoter (WO 96/12814) or the wound-inducible pinII promoter (EP-A-0 375 091) or others as described herein.

[0382] Preferred promoters are in particular those which bring about gene expression in tissues and organs in which the biosynthesis of nitrogen or nitrogen containing compounds like amino acids or proteins takes place, in seed cells, such as endosperm cells and cells of the developing embryo. Suitable promoters are the oilseed rape napin gene promoter (U.S. Pat. No. 5,608,152), the Vicia faba USP promoter (Baeumlein et al., Mol Gen Genet, 1991, 225 (3):459-67), the Arabidopsis oleosin promoter (WO 98/45461), the Phaseolus vulgaris phaseolin promoter (U.S. Pat. No. 5,504,200), the Brassica Bce4 promoter (WO 91/13980), the bean arc5 promoter, the carrot DcG3 promoter, or the Legumin B4 promoter (LeB4; Baeumlein et al., 1992, Plant Journal, 2 (2):233-9), and promoters which bring about the seed-specific expression in monocotyledonous plants such as maize, barley, wheat, rye, rice and the like. Advantageous seed-specific promoters are the sucrose binding protein promoter (WO 00/26388), the phaseolin promoter and the napin promoter. Suitable promoters which must be considered are the barley lpt2 or lpt1 gene promoter (WO 95/15389 and WO 95/23230), and the promoters described in WO 99/16890 (promoters from the barley hordein gene, the rice glutelin gene, the rice oryzin gene, the rice prolamin gene, the wheat gliadin gene, the wheat glutelin gene, the maize zein gene, the oat glutelin gene, the sorghum kasirin gene and the rye secalin gene). Further suitable promoters are Amy32b, Amy 6-6 and Aleurain [U.S. Pat. No. 5,677,474], Bce4 (oilseed rape) [U.S. Pat. No. 5,530,149], glycinin (soya) [EP 571 741], phosphoenolpyruvate carboxylase (soya) [JP 06/62870], ADR12-2 (soya) [WO 98/08962], isocitrate lyase (oilseed rape) [U.S. Pat. No. 5,689,040] or α-amylase (barley) [EP 781 849]. Other promoters which are available for the expression of genes in plants are leaf-specific promoters such as those described in DE-A 19644478 or light-regulated promoters such as, for example, the pea petE promoter.

[0383] Further suitable plant promoters are the cytosolic FBPase promoter or the potato ST-LSI promoter (Stockhaus et al., EMBO J. 8,1989, 2445), the Glycine max phosphoribosylpyrophosphate amidotransferase promoter (GenBank Accession No. U87999) or the node-specific promoter described in EP-A-0 249 676.

[0384] Other promoters, which are particularly suitable, are those which bring about plastid-specific expression. Suitable promoters such as the viral RNA polymerase promoter are described in WO 95/16783 and WO 97/06250, and the Arabidopsis clpP promoter, which is described in WO 99/46394.

[0385] Other promoters, which are used for the strong expression of heterologous sequences in as many tissues as possible, in particular also in leaves, are, in addition to several of the abovementioned viral and bacterial promoters, preferably, plant promoters of actin or ubiquitin genes such as, for example, the rice actin1 promoter. Further examples of constitutive plant promoters are the sugarbeet V-ATPase promoters (WO 01/14572). Examples of synthetic constitutive promoters are the Super promoter (WO 95/14098) and promoters derived from G-boxes (WO 94/12015). If appropriate, chemical inducible promoters may furthermore also be used, compare EP-A 388186, EP-A 335528, WO 97/06268.

[0386] As already mentioned herein, further regulatory sequences, which may be expedient, if appropriate, also include sequences, which target the transport and/or the localization of the expression products. Sequences, which must be mentioned in this context are, in particular, the signal-peptide- or transit-peptide-encoding sequences which are known per se. For example, plastid-transit-peptide-encoding sequences enable the targeting of the expression product into the plastids of a plant cell.

[0387] Preferred recipient plants are, as described above, in particular those plants, which can be transformed in a suitable manner. These include monocotyledonous and dicotyledonous plants. Plants which must be mentioned in particular are agriculturally useful plants such as cereals and grasses, for example Triticum spp., Zea mays, Hordeum vulgare, oats, Secale cereale, Oryza sativa, Pennisetum glaucum, Sorghum bicolor, Triticale, Agrostis spp., Cenchrus ciliaris, Dactylis glomerata, Festuca arundinacea, Lolium spp., Medicago spp. and Saccharum spp., legumes and oil crops, for example Brassica juncea, Brassica napus, Glycine max, Arachis hypogaea, Gossypium hirsutum, Cicer arietinum, Helianthus annuus, Lens culinaris, Linum usitatissimum, Sinapis alba, Trifolium repens and Vicia narbonensis, vegetables and fruits, for example bananas, grapes, Lycopersicon esculentum, asparagus, cabbage, watermelons, kiwi fruit, Solanum tuberosum, Beta vulgaris, cassaya and chicory, trees, for example Coffea species, Citrus spp., Eucalyptus spp., Picea spp., Pinus spp. and Populus spp., medicinal plants and trees, and flowers.

[0388] One embodiment of the present invention also relates to a method for generating a vector, which comprises the insertion, into a vector, of the nucleic acid molecule characterized herein, the nucleic acid molecule according to the invention or the expression cassette according to the invention. The vector can, for example, be introduced in to a cell, e.g. a microorganism or a plant cell, as described herein for the nucleic acid construct, or below under transformation or transfection or shown in the examples. A transient or stable transformation of the host or target cell is possible, however, a stable transformation is preferred. The vector according to the invention is preferably a vector, which is suitable for expressing the polypeptide according to the invention in a plant. The method can thus also encompass one or more steps for integrating regulatory signals into the vector, in particular signals, which mediate the expression in microorganisms or plants.

[0389] Accordingly, the present invention also relates to a vector comprising the nucleic acid molecule characterized herein as part of a nucleic acid construct suitable for plant expression or the nucleic acid molecule according to the invention.

[0390] The advantageous vectors of the invention comprise the nucleic acid molecules which encode proteins according to the invention, nucleic acid molecules which are used in the process, or nucleic acid construct suitable for plant expression comprising the nucleic acid molecules used, either alone or in combination with further genes such as the biosynthesis or regulatory genes of amino acid metabolism e.g. with the genes mentioned herein above. In accordance with the invention, the term “vector” refers to a nucleic acid molecule, which is capable of transporting another nucleic acid to which it is linked. One type of vector is a “plasmid”, which means a circular double-stranded DNA loop into which additional DNA segments can be ligated. A further type of vector is a viral vector, it being possible to ligate additional nucleic acids segments into the viral genome. Certain vectors are capable of autonomous replication in a host cell into which they have been introduced (for example bacterial vectors with bacterial replication origin). Other preferred vectors are advantageously completely or partly integrated into the genome of a host cell when they are introduced into the host cell and thus replicate together with the host genome. Moreover, certain vectors are capable of controlling the expression of genes with which they are in operable linkage. In the present context, these vectors are referred to as “expression vectors”. As mentioned above, they are capable of autonomous replication or may be integrated partly or completely into the host genome. Expression vectors, which are suitable for DNA recombination techniques usually take the form of plasmids. In the present description, “plasmid” and “vector” can be used interchangeably since the plasmid is the most frequently used form of a vector. However, the invention is also intended to encompass these other forms of expression vectors, such as viral vectors, which exert similar functions. The term vector is furthermore also to encompass other vectors which are known to the skilled worker, such as phages, viruses such as SV40, CMV, TMV, transposons, IS elements, phasmids, phagemids, cosmids, and linear or circular DNA.

[0391] The recombinant expression vectors which are advantageously used in the process comprise the nucleic acid molecules according to the invention or the nucleic acid construct according to the invention in a form which is suitable for expressing, in a host cell, the nucleic acid molecules according to the invention or described herein. Accordingly, the recombinant expression vectors comprise one or more regulatory signals selected on the basis of the host cells to be used for the expression, in operable linkage with the nucleic acid sequence to be expressed.

[0392] In a recombinant expression vector, “operable linkage” means that the nucleic acid molecule of interest is linked to the regulatory signals in such a way that expression of the nucleic acid molecule is possible: they are linked to one another in such a way that the two sequences fulfill the predicted function assigned to the sequence (for example in an in-vitro transcription/translation system, or in a host cell if the vector is introduced into the host cell).

[0393] The term “regulatory sequence” is intended to comprise promoters, enhancers and other expression control elements (for example polyadenylation signals These regulatory sequences are described, for example, in Goeddel: Gene Expression Technology Methods in Enzymology 185, Academic Press, San Diego, Calif. (1990), or see: Gruber and Crosby, in: Methods in Plant Molecular Biology and Biotechnolgy, CRC Press, Boca Raton, Fla., Ed.: Glick and Thompson, chapter 7, 89-108, including the references cited therein. Regulatory sequences encompass those, which control the constitutive expression of a nucleotide sequence in many types of host cells and those which control the direct expression of the nucleotide sequence in specific host cells only, and under specific conditions. The skilled worker knows that the design of the expression vector may depend on factors such as the selection of the host cell to be transformed, the extent to which the desired protein is expressed, and the like. A preferred selection of regulatory sequences is described above, for example promoters, terminators, enhancers and the like. The term regulatory sequence is to be considered as being encompassed by the term regulatory signal. Several advantageous regulatory sequences, in particular promoters and terminators are described above. In general, the regulatory sequences described as advantageous for nucleic acid construct suitable for expression are also applicable for vectors.

[0394] The recombinant expression vectors used can be designed specifically for the expression, in prokaryotic and/or eukaryotic cells, of nucleic acid molecules used in the process. This is advantageous since intermediate steps of the vector construction are frequently carried out in microorganisms for the sake of simplicity. For example, the genes according to the invention and other genes can be expressed in bacterial cells, insect cells (using baculovirus expression vectors), yeast cells and other fungal cells [Romanos (1992), Yeast 8:423-488; van den Hondel, (1991), in: More Gene Manipulations in Fungi, J. W. Bennet & L. L. Lasure, Ed., pp. 396-428: Academic Press: San Diego; and van den Hondel, C. A. M. J. J. (1991), in: Applied Molecular Genetics of Fungi, Peberdy, J. F., et al., Ed., pp. 1-28, Cambridge University Press: Cambridge], algae [Falciatore et al., 1999, Marine Biotechnology.1, 3:239-251] using vectors and following a transformation method as described in WO 98/01572, and preferably in cells of multi-celled plants [see Schmidt, R. and Willmitzer, L. (1988) Plant Cell Rep.:583-586; Plant Molecular Biology and Biotechnology, C Press, Boca Raton, Fla., chapter 6/7, pp. 71-119 (1993); F. F. White, in: Transgenic Plants, Bd. 1, Engineering and Utilization, Ed.: Kung and R. Wu, Academic Press (1993), 128-43; Potrykus, Annu. Rev. Plant Physiol. Plant Molec. Biol. 42 (1991), 205-225 (and references cited therein)]. Suitable host cells are furthermore discussed in Goeddel, Gene Expression Technology: Methods in Enzymology 185, Academic Press, San Diego, Calif. (1990). As an alternative, the sequence of the recombinant expression vector can be transcribed and translated in vitro, for example using T7 promotor-regulatory sequences and T7 polymerase.

[0395] Proteins can be expressed in prokaryotes using vectors comprising constitutive or inducible promoters, which control the expression of fusion proteins or nonfusion proteins. Typical fusion expression vectors are, inter alia, pGEX (Pharmacia Biotech Inc; Smith, D. B., and Johnson, K. S. (1988) Gene 67:31-40), pMAL (New England Biolabs, Beverly, Mass.) and pRIT5 (Pharmacia, Piscataway, N.J.), in which glutathione-S-transferase (GST), maltose-E-binding protein or protein A is fused with the recombinant target protein. Examples of suitable inducible nonfusion E. coli expression vectors are, inter alia, pTrc (Amann et al. (1988) Gene 69:301-315) and pET 11d [Studier et al., Gene Expression Technology: Methods in Enzymology 185, Academic Press, San Diego, Calif. (1990) 60-89]. The target gene expression of the pTrc vector is based on the transcription of a hybrid trp-lac fusion promoter by the host RNA polymerase. The target gene expression from the pET 11d vector is based on the transcription of a T7-gn10-lac fusion promoter, which is mediated by a coexpressed viral RNA polymerase (T7 gn1). This viral polymerase is provided by the host strains BL21 (DE3) or HMS174 (DE3) by a resident λ-prophage which harbors a T7 gn1 gene under the transcriptional control of the lacUV 5 promoter.

[0396] Other vectors which are suitable in prokaryotic organisms are known to the skilled worker; these vectors are for example in E. coli pLG338, pACYC184, the pBR series, such as pBR322, the pUC series such as pUC18 or pUC19, the M113 mp series, pKC30, pRep4, pHS1, pHS2, pPLc236, pMBL24, pLG200, pUR290, pIN-III¹¹³-B1, λgt11 or pBdCl, in Streptomyces pIJ101, pIJ364, pIJ702 or pIJ361, in Bacillus pUB110, pC194 or pBD214, in Corynebacterium pSA77 or pAJ667.

[0397] In a further embodiment, the expression vector is a yeast expression vector. Examples of vectors for expression in the yeasts S. cerevisiae encompass pYeDesaturasec1 (Baldari et al. (1987) Embo J. 6:229-234), pMFa (Kurjan and Herskowitz (1982) Cell 30:933-943), pJRY88 (Schultz et al. (1987) Gene 54:113-123) and pYES2 (Invitrogen Corporation, San Diego, Calif.). Vectors and methods for the construction of vectors which are suitable for use in other fungi, such as the filamentous fungi, encompass those which are described in detail in: van den Hondel, C. A. M. J. J. [(1991), J. F. Peberdy, Ed., pp. 1-28, Cambridge University Press: Cambridge; or in: More Gene Manipulations in Fungi; J. W. Bennet & L. L. Lasure, Ed., pp. 396-428: Academic Press: San Diego]. Examples of other suitable yeast vectors are 2 μM, pAG-1, YEp6, YEp13 or pEMBLYe23.

[0398] Further vectors, which may be mentioned by way of example, are pALS1, pIL2 or pBB116 in fungi or pLGV23, pGHlac⁺, pBIN19, pAK2004 or pDH51 in plants.

[0399] As an alternative, the nucleic acid sequences can be expressed in insect cells using baculovirus expression vectors. Baculovirus vectors, which are available for expressing proteins in cultured insect cells (for example Sf9 cells) encompass the pAc series (Smith et al. (1983) Mol. Cell. Biol. 3:2156-2165) and the pVL series (Lucklow and Summers (1989) Virology 170:31-39).

[0400] The abovementioned vectors are only a small overview of potentially suitable vectors. Further plasmids are known to the skilled worker and are described, for example, in: Cloning Vectors (Ed. Pouwels, P. H., et al., Elsevier, Amsterdam-New York-Oxford, 1985, ISBN 0 444 904018). Further suitable expression systems for prokaryotic and eukaryotic cells, see the chapters 16 and 17 by Sambrook, J., Fritsch, E. F., and Maniatis, T., Molecular Cloning: A Laboratory Manual, 2nd Edition, Cold Spring Harbor Laboratory, Cold Spring Harbor Laboratory Press, Cold Spring Harbor, N.Y., 1989.

[0401] Accordingly, one embodiment of the invention relates to a vector where the nucleic acid molecule according to the invention is linked operably to regulatory sequences which permit the expression in a prokaryotic or eukaryotic or in a prokaryotic and eukaryotic host.

[0402] Accordingly, one embodiment of the invention relates to a host cell, which has been transformed stably or transiently with the vector according to the invention or the nucleic acid molecule according to the invention or the nucleic acid construct according to the invention.

[0403] The present invention also relates to a process for the production of a polypeptide according to the present invention, the polypeptide being expressed in a host cell according to the invention, preferably in a microorganism or a transgenic plant cell.

[0404] In one embodiment, the nucleic acid molecule used in the process for the production of the polypeptide is derived from a microorganism, preferably from a prokaryotic or protozoic cell with an eukaryotic organism as host cell. E.g., in one embodiment the polypeptide is produced in a plant cell or plant with a nucleic acid molecule derived from a prokaryote or a fungus or an alga or an other microorganism but not from plant.

[0405] The skilled worker knows that protein and DNA expressed in different organisms differ in many respects and properties, e.g. DNA modulation and imprinting, such as methylation or post-translational modification, as for example glucosylation, phosphorylation, acetylation, myristoylation, ADP-ribosylation, farnesylation, carboxylation, sulfation, ubiquination, etc. though having the same coding sequence. Preferably, the cellular expression control of the corresponding protein differs accordingly in the control mechanisms controlling the activity and expression of an endogenous protein or another eukaryotic protein. One major difference between proteins expressed in prokaryotic or eukaryotic organisms is the amount and pattern of glycosylation. For example in E. coli there are no glycosylated proteins. Proteins expressed in yeasts have high mannose content in the glycosylated proteins, whereas in plants the glycosylation pattern is complex.

[0406] The polypeptide of the present invention is preferably produced by recombinant DNA techniques. For example, a nucleic acid molecule encoding the protein is cloned into a vector (as described above), the vector is introduced into a host cell (as described above) and said polypeptide is expressed in the host cell. Said polypeptide can then be isolated from the cells by an appropriate purification scheme using standard protein purification techniques. Alternative to recombinant expression, the polypeptide or peptide of the present invention can be synthesized chemically using standard peptide synthesis techniques.

[0407] Moreover, a native polypeptide conferring the increase of nitrogen or nitrogen containing compounds in an organism or part thereof can be isolated from cells (e.g., endothelial cells), for example using the antibody of the present invention as described below, in particular, an antibody against a protein as indicated in Table II, column 3. E.g. an antibody against a polypeptide as indicated in Table II, columns 5 or 7, or an antigenic part thereof which can be produced by standard techniques utilizing polypeptides comprising or consisting of above mentioned sequences, e.g. the polypeptide of the present invention or fragment thereof. Preferred are monoclonal antibodies specifically binding to polypeptide as indicated in Table II, columns 5 or 7.

[0408] In one embodiment, the present invention relates to a polypeptide having the amino acid sequence encoded by a nucleic acid molecule of the invention or the nucleic acid molecule used in the method of the invention or obtainable by a process of the invention. Said polypeptide confers preferably the aforementioned activity, in particular, the polypeptide confers the increase in nitrogen or nitrogen containing compounds in a cell or an organism or a part thereof after increasing the cellular activity, e.g. by increasing the expression or the specific activity of the polypeptide.

[0409] In one embodiment, the present invention relates to a polypeptide having a sequence selected from the group as indicated in Table II, columns 5 or 7 or as encoded by a nucleic acid molecule selected from the group as indicated in Table I, columns 5 or 7 or functional homologues thereof.

[0410] In one advantageous embodiment, in the method of the present invention the activity of a polypeptide is increased which comprises or consists of a consensus sequence selected from the group as indicated in Table IV, column 7 and in one another embodiment, the present invention relates to a polypeptide comprising or consisting of a consensus sequence as indicated in Table IV, column 7 whereby 20 or less, preferably 15 or 10, preferably 9, 8, 7, or 6, more preferred 5 or 4, even more preferred 3, even more preferred 2, even more preferred 1, most preferred 0 of the amino acids positions indicated can be replaced by any amino acid or, in an further embodiment, can be replaced and/or absent. In one embodiment, the present invention relates to the method of the present invention comprising a polypeptide or to a polypeptide comprising more than one consensus sequences (of an individual line) as indicated in Table IV, column 7.

[0411] In one embodiment not more than 15%, preferably 10%, even more preferred 5%, 4%, 3%, or 2%, most preferred 1% or 0% of the amino acid position indicated by a letter are/is replaced another amino acid or, in another embodiment, are/is absent and/or replaced. In another embodiment the stretches of non-conserved amino acids, indicated by (X), vary in their length by 20%, preferably by 15 or 10%, even more preferred by 5%, 4%, 3%, 2% or most preferred by only 1%.

[0412] In one embodiment 20 or less, preferably 15 or 10, preferably 9, 8, 7, or 6, more preferred 5 or 4, even more preferred 3, even more preferred 2, even more preferred 1, most preferred 0 amino acids are inserted into the consensus sequence or, in an other embodiment, are absent and/or replaced.

[0413] The consensus sequences were derived from multiple alignments of the sequences as listed in table II. The letters represent the one letter amino acid code and indicate that the amino acids are conserved in all aligned proteins. The letter X stands for amino acids, which are not conserved in all sequences. In one example, in the cases where only a small selected subset of amino acids are possible at a certain position these amino acids are given in brackets. The number of given X indicates the distances between conserved amino acid residues, e.g. Y-x(21,23)-F means that conserved tyrosine and phenylalanine residues are separated from each other by minimum 21 and maximum 23 amino acid residues in all investigated sequences.

[0414] Conserved domains were identified from all sequences and are described using a subset of the standard Prosite notation, e.g. the pattern Y-x(21,23)-[FW] means that a conserved tyrosine is separated by minimum 21 and maximum 23 amino acid residues from either a phenylalanine or tryptophane.

[0415] Conserved patterns were identified with the software tool MEME version 3.5.1 or manually. MEME was developed by Timothy L. Bailey and Charles Elkan, Dept. of Computer Science and Engeneering, University of California, San Diego, USA and is described by Timothy L. Bailey and Charles Elkan [Fitting a mixture model by expectation maximization to discover motifs in biopolymers, Proceedings of the Second International Conference on Intelligent Systems for Molecular Biology, pp. 28-36, AAAI Press, Menlo Park, Calif., 1994]. The source code for the stand-alone program is public available from the San Diego Supercomputer center (http://meme.sdsc.edu).

[0416] For identifying common motifs in all sequences with the software tool MEME, the following settings were used: −maxsize 500000, −nmotifs 15, −evt 0.001, −maxw 60, −distance 1e-3, −minsites number of sequences used for the analysis. Input sequences for MEME were non-aligned sequences in Fasta format. Other parameters were used in the default settings in this software version.

[0417] Prosite patterns for conserved domains were generated with the software tool Pratt version 2.1 or manually. Pratt was developed by Inge Jonassen, Dept. of Informatics, University of Bergen, Norway and is described by Jonassen et al. [I. Jonassen, J. F. Collins and D. G. Higgins, Finding flexible patterns in unaligned protein sequences, Protein Science 4 (1995), pp. 1587-1595; I. Jonassen, Efficient discovery of conserved patterns using a pattern graph, Submitted to CABIOS Febr. 1997]. The source code (ANSI C) for the stand-alone program is public available, e.g. at established Bioinformatic centers like EBI (European Bioinformatics Institute).

[0418] For generating patterns with the software tool Pratt, following settings were used: PL (max Pattern Length): 100, PN (max Nrof Pattern Symbols): 100, PX (max Nr of consecutive x's): 30, FN (max Nr of flexible spacers): 5, FL (max Flexibility): 30, FP (max Flex.Product): 10, ON (max number patterns): 50. Input sequences for Pratt were distinct regions of the protein sequences exhibiting high similarity as identified from software tool MEME. The minimum number of sequences, which have to match the generated patterns (CM, min Nr of Seqs to Match) was set to at least 80% of the provided sequences. Parameters not mentioned here were used in their default settings.

[0419] The Prosite patterns of the conserved domains can be used to search for protein sequences matching this pattern. Various established Bioinformatic centers provide public internet portals for using those patterns in database searches (e.g. PIR [Protein Information Resource, located at Georgetown University Medical Center] or ExPASy [Expert Protein Analysis System]). Alternatively, stand-alone software is available, like the program Fuzzpro, which is part of the EMBOSS software package. For example, the program Fuzzpro not only allows to search for an exact pattern-protein match but also allows to set various ambiguities in the performed search.

[0420] The alignment was performed with the software ClustalW (version 1.83) and is described by Thompson et al. [Thompson, J. D., Higgins, D. G. and Gibson, T. J. (1994) CLUSTAL W: improving the sensitivity of progressive multiple sequence alignment through sequence weighting, positions-specific gap penalties and weight matrix choice. Nucleic Acids Research, 22:4673-4680]. The source code for the stand-alone program is public available from the European Molecular Biology Laboratory; Heidelberg, Germany. The analysis was performed using the default parameters of ClustalW v1.83 (gap open penalty: 10.0; gap extension penalty: 0.2; protein matrix: Gonnet; pprotein/DNA endgap: −1; protein/DNA gapdist: 4).

[0421] In one advantageous embodiment, the method of the present invention comprises the increasing of a polypeptide comprising or consisting of plant or microorganism specific consensus sequences. Accordingly, in one embodiment, the present invention relates to a polypeptide comprising or consisting of plant or microorganism specific consensus sequences.

[0422] In one embodiment, said polypeptide of the invention distinguishes over a sequence as indicated in Table II A or IIB, columns 5 or 7 by one or more amino acids. In one embodiment, polypeptide distinguishes form a sequence as indicated in Table II A or IIB, columns 5 or 7 by more than 1, 2, 3, 4, 5, 6, 7, 8 or 9 amino acids, preferably by more than 10, 15, 20, 25 or 30 amino acids, even more preferred are more than 40, 50, or 60 amino acids and, preferably, the sequence of the polypeptide of the invention distinguishes from a sequence as indicated in Table II A or II B, columns 5 or 7 by not more than 80% or 70% of the amino acids, preferably not more than 60% or 50%, more preferred not more than 40% or 30%, even more preferred not more than 20% or 10%. In an other embodiment, said polypeptide of the invention does not consist of a sequence as indicated in Table II A or II B, columns 5 or 7.

[0423] In one embodiment, the polypeptide of the invention comprises any one of the sequences not known to the public before. In one embodiment, the polypeptide of the invention originates from a non-plant cell, in particular from a microorganism, and was expressed in a plant cell. In one embodiment, the present invention relates to a polypeptide encoded by the nucleic acid molecule of the invention or used in the process of the invention for which an activity has not been described yet. In a further preferred embodiment the polypeptide of the invention comprises any of the sequences show in table II column 5 or 7 application no 2 or no. 3 and further a plastidal targeting sequence.

[0424] In one embodiment, the invention relates to polypeptide conferring an increase in nitrogen or nitrogen containing compounds in an organism or part thereof being encoded by the nucleic acid molecule of the invention or by a nucleic acid molecule used in the process of the invention.

[0425] In one embodiment, the polypeptide of the invention has a sequence which distinguishes from a sequence as indicated in Table II A or II B, columns 5 or 7 by one or more amino acids. In an other embodiment, said polypeptide of the invention does not consist of the sequence as indicated in Table II A or II B, columns 5 or 7. In a further embodiment, said polypeptide of the present invention is less than 100%, 99.999%, 99.99%, 99.9% or 99% identical. In one embodiment, said polypeptide does not consist of the sequence encoded by a nucleic acid molecules as indicated in Table I A or IB, columns 5 or 7. In one embodiment said polypeptide is a fusion peptide with a plastidal targeting sequence.

[0426] In one embodiment, the present invention relates to a polypeptide having an activity of a protein as indicated in Table II, column 3, which distinguishes over a sequence as indicated in Table II A or II B, columns 5 or 7 by one or more amino acids, preferably by more than 5, 6, 7, 8 or 9 amino acids, preferably by more than 10, 15, 20, 25 or 30 amino acids, even more preferred are more than 40, 50, or 60 amino acids but even more preferred by less than 70% of the amino acids, more preferred by less than 50%, even more preferred my less than 30% or 25%, more preferred are 20% or 15%, even more preferred are less than 10%.

[0427] The terms “protein” and “polypeptide” used in this application are interchangeable. “Polypeptide” refers to a polymer of amino acids (amino acid sequence) and does not refer to a specific length of the molecule. Thus peptides and oligopeptides are included within the definition of polypeptide. This term does also refer to or include post-translational modifications of the polypeptide, for example, glycosylations, acetylations, phosphorylations and the like. Included within the definition are, for example, polypeptides containing one or more analogs of an amino acid (including, for example, unnatural amino acids, etc.), polypeptides with substituted linkages, as well as other modifications known in the art, both naturally occurring and non-naturally occurring.

[0428] Preferably, the polypeptide is isolated. An “isolated” or “purified” protein or nucleic acid molecule or biologically active portion thereof is substantially free of cellular material when produced by recombinant DNA techniques or chemical precursors or other chemicals when chemically synthesized.

[0429] The language “substantially free of cellular material” includes preparations of the polypeptide of the invention in which the protein is separated from cellular components of the cells in which it is naturally or recombinantly produced. In one embodiment, the language “substantially free of cellular material” includes preparations having less than about 30% (by dry weight) of “contaminating protein”, more preferably less than about 20% of “contaminating protein”, still more preferably less than about 10% of “contaminating protein”, and most preferably less than about 5% “contaminating protein”. The term “Contaminating protein” relates to polypeptides, which are not polypeptides of the present invention. When the polypeptide of the present invention or biologically active portion thereof is recombinantly produced, it is also preferably substantially free of culture medium, i.e., culture medium represents less than about 20%, more preferably less than about 10%, and most preferably less than about 5% of the volume of the protein preparation. The language “substantially free of chemical precursors or other chemicals” includes preparations in which the polypeptide of the present invention is separated from chemical precursors or other chemicals, which are involved in the synthesis of the protein. The language “substantially free of chemical precursors or other chemicals” includes preparations having less than about 30% (by dry weight) of chemical precursors or non-polypeptide of the invention-chemicals, more preferably less than about 20% chemical precursors or non-polypeptide of the invention-chemicals, still more preferably less than about 10% chemical precursors or non-polypeptide of the invention-chemicals, and most preferably less than about 5% chemical precursors or non-polypeptide of the invention-chemicals. In preferred embodiments, isolated proteins or biologically active portions thereof lack contaminating proteins from the same organism from which the polypeptide of the present invention is derived. Typically, such proteins are produced by recombinant techniques.

[0430] Non-polypeptide of the invention-chemicals are e.g. polypeptides having not the activity and/or amino acid sequence of a polypeptide indicated in Table II, columns 3, 5 or 7.

[0431] A polypeptide of the invention can participate in the process of the present invention. The polypeptide or a portion thereof comprises preferably an amino acid sequence which is sufficiently homologous to an amino acid sequence as indicated in Table II, columns 5 or 7 such that the protein or portion thereof maintains the ability to confer the activity of the present invention. The portion of the protein is preferably a biologically active portion as described herein. Preferably, the polypeptide used in the process of the invention has an amino acid sequence identical to a sequence as indicated in Table II, columns 5 or 7.

[0432] Further, the polypeptide can have an amino acid sequence which is encoded by a nucleotide sequence which hybridizes, preferably hybridizes under stringent conditions as described above, to a nucleotide sequence of the nucleic acid molecule of the present invention. Accordingly, the polypeptide has an amino acid sequence which is encoded by a nucleotide sequence that is at least about 35%, 40%, 45%, 50%, 55%, 60%, 65% or 70%, preferably at least about 75%, 80%, 85% or 90, and more preferably at least about 91%, 92%, 93%, 94% or 95%, and even more preferably at least about 96%, 97%, 98%, 99% or more homologous to one of the nucleotide sequence as indicated in Table I, columns 5 or 7. The preferred polypeptide of the present invention preferably possesses at least one of the activities according to the invention and described herein. A preferred polypeptide of the present invention includes an amino acid sequence encoded by a nucleotide sequence which hybridizes, preferably hybridizes under stringent conditions, to a nucleotide sequence as indicated in Table I, columns 5 or 7 or which is homologous thereto, as defined above.

[0433] Accordingly the polypeptide of the present invention can vary from a sequence as indicated in Table II, columns 5 or 7 in amino acid sequence due to natural variation or mutagenesis, as described in detail herein. Accordingly, the polypeptide comprise an amino acid sequence which is at least about 35%, 40%, 45%, 50%, 55%, 60%, 65% or 70%, preferably at least about 75%, 80%, 85% or 90, and more preferably at least about 91%, 92%, 93%, 94% or 95%, and most preferably at least about 96%, 97%, 98%, 99% or more homologous to an entire amino acid sequence of a sequence as indicated in Table II A or IIB, columns 5 or 7.

[0434] For the comparison of amino acid sequences the same algorithms as described above or nucleic acid sequences can be used. Results of high quality are reached by using the algorithm of Needleman and Wunsch or Smith and Waterman. Therefore programs based on said algorithms are preferred. Advantageously the comparisons of sequences can be done with the program PileUp (J. Mol. Evolution., 25, 351-360, 1987, Higgins et al., CABIOS, 5 1989: 151-153) or preferably with the programs Gap and BestFit, which are respectively based on the algorithms of Needleman and Wunsch [J. Mol. Biol. 48; 443-453 (1970)] and Smith and Waterman [Adv. Appl. Math. 2; 482-489 (1981)]. Both programs are part of the GCG software-package [Genetics Computer Group, 575 Science Drive, Madison, Wis., USA 53711 (1991); Altschul et al. (1997) Nucleic Acids Res. 25:3389 et seq.]. Therefore preferably the calculations to determine the percentages of sequence homology are done with the program Gap over the whole range of the sequences. The following standard adjustments for the comparison of amino acid sequences were used: gap weight: 8, length weight: 2, average match: 2.912, average mismatch: −2.003.

[0435] Biologically active portions of an polypeptide of the present invention include peptides comprising amino acid sequences derived from the amino acid sequence of the polypeptide of the present invention or used in the process of the present invention, e.g., an amino acid sequence as indicated in Table II, columns 5 or 7 or the amino acid sequence of a protein homologous thereto, which include fewer amino acids than a full length polypeptide of the present invention or used in the process of the present invention or the full length protein which is homologous to an polypeptide of the present invention or used in the process of the present invention depicted herein, and exhibit at least one activity of polypeptide of the present invention or used in the process of the present invention.

[0436] Typically, biologically (or immunologically) active portions i.e. peptides, e.g., peptides which are, for example, 5, 10, 15, 20, 30, 35, 36, 37, 38, 39, 40, 50, 100 or more amino acids in length comprise a domain or motif with at least one activity or epitope of a polypeptide of the present invention or used in the process of the present invention. Moreover, other biologically active portions, in which other regions of the polypeptide are deleted, can be prepared by recombinant techniques and evaluated for one or more of the activities described herein.

[0437] Manipulation of the nucleic acid molecule of the invention or the nucleic acid molecule used in the method of the invention may result in the production of a protein having essentially the activity of the polypeptides as indicated in Table II, column 3 but having differences in the sequence from said wild-type protein. These proteins may be improved in efficiency or activity, may be present in greater numbers in the cell than is usual, or may be decreased in efficiency or activity in relation to the wild type protein.

[0438] Any mutagenesis strategies for the polypeptide of the present invention or the polypeptide used in the process of the present invention to result in increasing said activity are not meant to be limiting; variations on these strategies will be readily apparent to one skilled in the art. Using such strategies, and incorporating the mechanisms disclosed herein, the nucleic acid molecule and polypeptide of the invention or the polypeptide used in the method of the invention may be utilized to generate plants or parts thereof, expressing one or more wildtype protein(s) or one or more mutated protein encoding nucleic acid molecule(s) or polypeptide molecule(s) of the invention such that the yield, production, and/or efficiency of production of a desired compound is improved.

[0439] This desired compound may be any natural product of plants, which includes the final products of biosynthesis pathways and intermediates of naturally-occurring metabolic pathways, as well as molecules which do not naturally occur in the metabolism of said cells, but which are produced by a said cells of the invention. Preferably, the compound is a composition comprising nitrogen or nitrogen containing compounds.

[0440] %

[0441] The invention also provides chimeric or fusion proteins.

[0442] As used herein, an “chimeric protein” or “fusion protein” comprises an polypeptide operatively linked to a polypeptide which does not confer above-mentioned activity, in particular, which does not confer an increase of content of nitrogen or nitrogen containing compounds in a cell or an organism or a part thereof, if its activity is increased.

[0443] In one embodiment, an reference to a “protein (=polypeptide) of the invention” or as indicated in Table II, columns 5 or 7 refers to a polypeptide having an amino acid sequence corresponding to the polypeptide of the invention or used in the process of the invention, whereas a “non-polypeptide of the invention” or “other polypeptide” not being indicated in Table II, columns 5 or 7 refers to a polypeptide having an amino acid sequence corresponding to a protein which is not substantially homologous a polypeptide of the invention, preferably which is not substantially homologous to a polypeptide as indicated in Table II, columns 5 or 7 e.g., a protein which does not confer the activity described herein or annotated or known for as indicated in Table II, column 3 and which is derived from the same or a different organism. In one embodiment, a “non-polypeptide of the invention” or “other polypeptide” not being indicated in Table II, columns 5 or 7 does not confer an increase of nitrogen or nitrogen containing compounds in an organism or part thereof.

[0444] Within the fusion protein, the term “operatively linked” is intended to indicate that the polypeptide of the invention or a polypeptide used in the process of the invention and the “other polypeptide” or a part thereof are fused to each other so that both sequences fulfil the proposed function addicted to the sequence used. The “other polypeptide” can be fused to the N-terminus or C-terminus of the polypeptide of the invention or used in the process of the invention. For example, in one embodiment the fusion protein is a GST-LMRP fusion protein in which the sequences of the polypeptide of the invention or the polypeptide used in the process of the invention are fused to the C-terminus of the GST sequences. Such fusion proteins can facilitate the purification of recombinant polypeptides of the invention or a polypeptide useful in the process of the invention.

[0445] In another embodiment, the fusion protein is a polypeptide of the invention or a polypeptide used in the process of the invention containing a heterologous signal sequence at its N-terminus. In certain host cells (e.g., mammalian host cells), expression and/or secretion of a polypeptide of the invention or a polypeptide used in the process of the invention can be increased through use of a heterologous signal sequence. As already mentioned above, targeting sequences, are required for targeting the gene product into specific cell compartment (for a review, see Kermode, Crit. Rev. Plant Sci. 15, 4 (1996) 285-423 and references cited therein), for example into the vacuole, the nucleus, all types of plastids, such as amyloplasts, chloroplasts, chromoplasts, the extracellular space, the mitochondria, the endoplasmic reticulum, elaioplasts, peroxisomes, glycosomes, and other compartments of cells or extracellular. Sequences, which must be mentioned in this context are, in particular, the signal-peptide- or transit-peptide-encoding sequences which are known per se. For example, plastid-transit-peptide-encoding sequences enable the targeting of the expression product into the plastids of a plant cell. Targeting sequences are also known for eukaryotic and to a lower extent for prokaryotic organisms and can advantageously be operable linked with the nucleic acid molecule of the present invention to achieve an expression in one of said compartments or extracellular. Therefore In a preferred embodiment the polypeptide of the invention, specifically the polypeptide encompassing a sequence as shown in table II column 5 or 7 are in “operative linkage” with a plastidal targeting sequence, resulting in a functional fusion protein, which is able to direct the fusion protein to the plastidal compartment and which mediates the import of the polypeptide of the invention, specifically the polypeptide encompassing a sequence as shown in table II, column 5 or 7, into the plastidial compartment.

[0446] Preferably, a chimeric or fusion protein of the invention is produced by standard recombinant DNA techniques. For example, DNA fragments coding for the different polypeptide sequences are ligated together in-frame in accordance with conventional techniques, for example by employing blunt-ended or stagger-ended termini for ligation, restriction enzyme digestion to provide for appropriate termini, filling-in of cohesive ends as appropriate, alkaline phosphatase treatment to avoid undesirable joining, and enzymatic ligation. The fusion gene can be synthesized by conventional techniques including automated DNA synthesizers. Alternatively, PCR amplification of gene fragments can be carried out using anchor primers, which give rise to complementary overhangs between two consecutive gene fragments which can subsequently be annealed and reamplified to generate a chimeric gene sequence (see, for example, Current Protocols in Molecular Biology, eds. Ausubel et al. John Wiley & Sons: 1992). Moreover, many expression vectors are commercially available that already encode a fusion moiety (e.g., a GST polypeptide). The nucleic acid molecule of the invention or the nucleic acid molecule used in the method of the invention can be cloned into such an expression vector such that the fusion moiety is linked in-frame to the encoded protein.

[0447] Furthermore, folding simulations and computer redesign of structural motifs of the protein of the invention can be performed using appropriate computer programs (Olszewski, Proteins 25 (1996), 286-299; Hoffman, Comput. Appl. Biosci. 11 (1995), 675-679). Computer modelling of protein folding can be used for the conformational and energetic analysis of detailed peptide and protein models (Monge, J. Mol. Biol. 247 (1995), 995-1012; Renouf, Adv. Exp. Med. Biol. 376 (1995), 37-45). The appropriate programs can be used for the identification of interactive sites the polypeptide of the invention or polypeptides used in the process of the invention and its substrates or binding factors or other interacting proteins by computer assistant searches for complementary peptide sequences (Fassina, Immunomethods (1994), 114-120). Further appropriate computer systems for the design of protein and peptides are described in the prior art, for example in Berry, Biochem. Soc. Trans. 22 (1994), 1033-1036; Wodak, Ann. N.Y. Acad. Sci. 501 (1987), 1-13; Pabo, Biochemistry 25 (1986), 5987-5991. The results obtained from the above-described computer analysis can be used for, e.g., the preparation of peptidomimetics of the protein of the invention or fragments thereof. Such pseudopeptide analogues of the, natural amino acid sequence of the protein may very efficiently mimic the parent protein (Benkirane, J. Biol. Chem. 271 (1996), 33218-33224). For example, incorporation of easily available achiral Q-amino acid residues into a protein of the invention or a fragment thereof results in the substitution of amide bonds by polymethylene units of an aliphatic chain, thereby providing a convenient strategy for constructing a peptidomimetic (Banerjee, Biopolymers 39 (1996), 769-777).

[0448] Superactive peptidomimetic analogues of small peptide hormones in other systems are described in the prior art (Zhang, Biochem. Biophys. Res. Commun. 224 (1996), 327-331). Appropriate peptidomimetics of the protein of the present invention can also be identified by the synthesis of peptidomimetic combinatorial libraries through successive amide alkylation and testing the resulting compounds, e.g., for their binding and immunological properties. Methods for the generation and use of peptidomimetic combinatorial libraries are described in the prior art, for example in Ostresh, Methods in Enzymology 267 (1996), 220-234 and Dorner, Bioorg. Med. Chem. 4 (1996), 709-715.

[0449] Furthermore, a three-dimensional and/or crystallographic structure of the protein of the invention can be used for the design of peptidomimetic inhibitors of the biological activity of the protein of the invention (Rose, Biochemistry 35 (1996), 12933-12944; Rutenber, Bioorg. Med. Chem. 4 (1996), 1545-1558).

[0450] Furthermore, a three-dimensional and/or crystallographic structure of the protein of the invention and the identification of interactive sites the polypeptide of the invention or the polypeptide used in the method of the invention and its substrates or binding factors can be used for the identification or design of mutants with modulated binding or turn over activities. For example, the active centre of the polypeptide of the present invention can be modelled and amino acid residues participating in the catalytic reaction can be modulated to increase or decrease the binding of the substrate to activate or improve the polypeptide. The identification of the active centre and the amino acids involved in the catalytic reaction facilitates the screening for mutants having an increased activity.

[0451] The sequences shown herein have also been described under their protein name as described in the Table I, II, III or IV, column 3.

[0452] In an especially preferred embodiment, the polypeptide according to the invention furthermore also does not have the sequences of those proteins which are encoded by the sequences shown in the Table II, column 5 or 7.

[0453] One embodiment of the invention also relates to an antibody, which binds specifically to the polypeptide according to the invention or parts, i.e. specific fragments or epitopes of such a protein.

[0454] The antibodies of the invention can be used to identify and isolate the polypeptide according to the invention and encoding genes in any organism, preferably plants, prepared in plants described herein. These antibodies can be monoclonal antibodies, polyclonal antibodies or synthetic antibodies as well as fragments of antibodies, such as Fab, Fv or scFv fragments etc. Monoclonal antibodies can be prepared, for example, by the techniques as originally described in Köhler and Milstein, Nature 256 (1975), 495, and Galfr6, Meth. Enzymol. 73 (1981), 3, which comprise the fusion of mouse myeloma cells to spleen cells derived from immunized mammals.

[0455] Furthermore, antibodies or fragments thereof to the aforementioned peptides can be obtained by using methods, which are described, e.g., in Harlow and Lane “Antibodies, A Laboratory Manual”, CSH Press, Cold Spring Harbor, 1988. These antibodies can be used, for example, for the immunoprecipitation and immunolocalization of proteins according to the invention as well as for the monitoring of the synthesis of such proteins, for example, in recombinant organisms, and for the identification of compounds interacting with the protein according to the invention. For example, surface plasmon resonance as employed in the BIAcore system can be used to increase the efficiency of phage antibodies selections, yielding a high increment of affinity from a single library of phage antibodies, which bind to an epitope of the protein of the invention (Schier, Human Antibodies Hybridomas 7 (1996), 97-105; Malmborg, J. Immunol. Methods 183 (1995), 7-13). In many cases, the binding phenomena of antibodies to antigens are equivalent to other ligand/anti-ligand binding.

[0456] In one embodiment, the present invention relates to an antisense nucleic acid molecule comprising the complementary sequence of the nucleic acid molecule of the present invention.

[0457] Methods to modify the expression levels and/or the activity are known to persons skilled in the art and include for instance overexpression, co-suppression, the use of ribozymes, sense and anti-sense strategies or other gene silencing approaches like RNA interference (RNAi) or promoter methylation. “Sense strand” refers to the strand of a double-stranded DNA molecule that is homologous to an mRNA transcript thereof. The “anti-sense strand” contains an inverted sequence, which is complementary to that of the “sense strand”.

[0458] In addition the expression levels and/or the activity can be modified by the introduction of mutations in the regulatory or coding regions of the nucleic acids of the invention. Furthermore antibodies can be expressed which specifically binds to a polypeptide of interest and thereby blocks it activity. The protein-binding factors can, for example, also be aptamers [Famulok M and Mayer G (1999) Curr. Top Microbiol. Immunol. 243: 123-36] or antibodies or antibody fragments or single-chain antibodies. Obtaining these factors has been described, and the skilled worker is familiar therewith. For example, a cytoplasmic scFv antibody has been employed for modulating activity of the phytochrome A protein in genetically modified tobacco plants [Owen M et al. (1992) Biotechnology (NY) 10(7): 790-794; Franken E et al. (1997) Curr. Opin. Biotechnol. 8(4): 411-416; Whitelam (1996) Trend Plant Sci. 1: 286-272]. In a further preferred embodiment of the invention the expression level and/or the activity can be changed through modifications of the internal regulators. The person skilled in the art is familiar with the different options of internal regulators which can be used to modify the expression level of the genes or proteins of the invention. In exemplary embodiment an negative transcriptional regulator, e.g. a repressor of a nucleic acid of the invention is inhibited or knockout, for example through antisense or RNAi inhibition, leading to an enhanced expression of the nucleic acid of the invention. Similarly a allosteric inhibitor of a protein of the invention can be subjected to downregulation by mutation, or antisense or RNAi inhibition.

[0459] An “antisense” nucleic acid molecule comprises a nucleotide sequence, which is complementary to a “sense” nucleic acid molecule encoding a protein, e.g., complementary to the coding strand of a double-stranded cDNA molecule or complementary to an encoding mRNA sequence. Accordingly, an antisense nucleic acid molecule can bond via hydrogen bonds to a sense nucleic acid molecule. The antisense nucleic acid molecule can be complementary to an entire coding strand of a nucleic acid molecule conferring the regulation or expression of the polypeptide of the invention or used in the process of the present invention, as the nucleic acid molecule of the invention or the nucleic acid molecule used in the method of the invention coding strand, or to only a portion thereof.

[0460] %

[0461] %

[0462] %

[0463] %

[0464] %

[0465] %

[0466] %

[0467] %

[0468] %

[0469] %

[0470] %

[0471] %

[0472] %

[0473] %

[0474] %

[0475] %.

[0476] %

[0477] %.

[0478] %

[0479] %

[0480] %

[0481] %

[0482] %.

[0483] %.

[0484] A further embodiment of the invention also relates to a method for the generation of a transgenic host or host cell, e.g. a eukaryotic or prokaryotic cell, preferably a transgenic microorganism, a transgenic plant cell or a transgenic plant tissue or a transgenic plant, which comprises introducing, into the plant, the plant cell or the plant tissue, the nucleic acid construct according to the invention, the vector according to the invention, or the nucleic acid molecule according to the invention.

[0485] A further embodiment of the invention also relates to a method for the transient generation of a host or host cell, eukaryotic or prokaryotic cell, preferably a transgenic microorganism, a transgenic plant cell or a transgenic plant tissue or a transgenic plant, which comprises introducing, into the plant, the plant cell or the plant tissue, the nucleic acid construct according to the invention, the vector according to the invention, the nucleic acid molecule characterized herein as being contained in the nucleic acid construct of the invention or the nucleic acid molecule according to the invention, whereby the introduced nucleic acid molecules, nucleic acid construct and/or vector is not integrated into the genome of the host or host cell. Therefore the transformants are not stable during the propagation of the host in respect of the introduced nucleic acid molecules, nucleic acid construct and/or vector.

[0486] In the process according to the invention, transgenic organisms are also to be understood as meaning—if they take the form of plants—plant cells, plant tissues, plant organs such as root, shoot, stem, seed, flower, tuber or leaf, or intact plants which are grown for enhanced nitrogen assimilation, accumulation and/or utilization.

[0487] Growing is to be understood as meaning for example culturing the transgenic plant cells, plant tissue or plant organs on or in a nutrient medium or the intact plant on or in a substrate, for example in hydroponic culture, potting compost or on a field soil. In one specific embodiment growing relates to the grow of the transgenic plants, plant cells, plant tissue under nitrogen limited conditions.

[0488] In a further advantageous embodiment of the process, the nucleic acid molecules can be expressed in single-celled plant cells (such as algae), see Falciatore et al., 1999, Marine Biotechnology 1 (3): 239-251 and references cited therein, and plant cells from higher plants (for example spermatophytes such as crops). Examples of plant expression vectors encompass those which are described in detail herein or in: Becker, D. [(1992) Plant Mol. Biol. 20:1195-1197] and Bevan, M. W. [(1984), Nucl. Acids Res. 12:8711-8721; Vectors for Gene Transfer in Higher Plants; in: Transgenic Plants, Vol. 1, Engineering and Utilization, Ed.: Kung and R. Wu, Academic Press, 1993, pp. 15-38]. An overview of binary vectors and their use is also found in Hellens, R. [(2000), Trends in Plant Science, Vol. 5 No. 10, 446-451.

[0489] In one embodiment of the invention, plant expression vectors encompass those which are described in the figures: FIG. 1 and/or FIG. 2.

[0490] Vector DNA can be introduced into prokaryotic or eukaryotic cells via conventional transformation or transfection techniques. The terms “transformation” and “transfection” include conjugation and transduction and, as used in the present context, are intended to encompass a multiplicity of prior-art methods for introducing foreign nucleic acid molecules (for example DNA) into a host cell, including calcium phosphate coprecipitation or calcium chloride coprecipitation, DEAE-dextran-mediated transfection, PEG-mediated transfection, lipofection, natural competence, chemically mediated transfer, electroporation or particle bombardment. Suitable methods for the transformation or transfection of host cells, including plant cells, can be found in Sambrook et al. (Molecular Cloning: A Laboratory Manual., 2nd Ed., Cold Spring Harbor Laboratory, Cold Spring Harbor Laboratory Press, Cold Spring Harbor, N.Y., 1989) and in other laboratory handbooks such as Methods in Molecular Biology, 1995, Vol. 44, Agrobacterium protocols, Ed.: Gartland and Davey, Humana Press, Totowa, N.J.

[0491] The above-described methods for the transformation and regeneration of plants from plant tissues or plant cells are exploited for transient or stable transformation of plants. Suitable methods are the transformation of protoplasts by polyethylene-glycol-induced DNA uptake, the biolistic method with the gene gun—known as the particle bombardment method—, electroporation, the incubation of dry embryos in DNA-containing solution, microinjection and the Agrobacterium-mediated gene transfer. The abovementioned methods are described for example in B. Jenes, Techniques for Gene Transfer, in: Transgenic Plants, Vol. 1, Engineering and Utilization, edited by S. D. Kung and R. Wu, Academic Press (1993) 128-143 and in Potrykus Annu. Rev. Plant Physiol. Plant Molec. Biol. 42 (1991) 205-225. The construct to be expressed is preferably cloned into a vector, which is suitable for transforming Agrobacterium tumefaciens, for example pBin19 (Bevan, Nucl. Acids Res. 12 (1984) 8711). Agrobacteria transformed with such a vector can then be used in the known manner for the transformation of plants, in particular crop plants, such as, for example, tobacco plants, for example by bathing scarified leaves or leaf segments in an agrobacterial solution and subsequently culturing them in suitable media. The transformation of plants with Agrobacterium tumefaciens is described for example by Höfgen and Willmitzer in Nucl. Acid Res. (1988) 16, 9877 or known from, inter alia, F. F. White, Vectors for Gene Transfer in Higher Plants; in Transgenic Plants, Vol. 1, Engineering and Utilization, edited by S. D. Kung and R. Wu, Academic Press, 1993, pp. 15-38.

[0492] To select for the successful transfer of the nucleic acid molecule, vector or nucleic acid construct of the invention according to the invention into a host organism, it is advantageous to use marker genes as have already been described above in detail. It is known of the stable or transient integration of nucleic acids into plant cells that only a minority of the cells takes up the foreign DNA and, if desired, integrates it into its genome, depending on the expression vector used and the transfection technique used. To identify and select these integrants, a gene encoding for a selectable marker (as described above, for example resistance to antibiotics) is usually introduced into the host cells together with the gene of interest. Preferred selectable markers in plants comprise those, which confer resistance to an herbicide such as glyphosate or gluphosinate. Other suitable markers are, for example, markers, which encode genes involved in biosynthetic pathways of, for example, sugars or amino acids, such as β-galactosidase, ura3, ilv2 or a mutated acetohydroxyacid synthase (AHAS) gene, also known as acetolactate synthase (ALS) gene or a gene for a D-amino acid metabolizing enzmye. Markers, which encode genes such as luciferase, gfp or other fluorescence genes, are likewise suitable. Additional markers named in the literature sometimes as secondary markers, genes coding for the resistance against herbicides such as phosphinothricin (=glufosinate, BASTA™, Liberty™, encoded by the bar gene), glyphosate (═N-(phosphonomethyl)glycine, Roundup Ready™, encoded by the 5-enolpyruvylshikimate-3-phosphate synthase gene=epsps), sulfonylurea (=Staple™, encoded by the acetolactate synthase gene), imidazolinone [=IMI, imazethapyr, imazamox, Clearfield™, encoded by the acetohydroxyacid synthase (AHAS) gene, also known as acetolactate synthase (ALS) gene] or bromoxynil (=Buctril™, encoded by the oxy gene) or genes coding for antibiotics such as hygromycin or G418 are useful for selection. In addition negative selection markers such as the bacterial cytosine deaminase (encoded by the codA gene) are also useful for the transformation of plastids.

[0493] These markers and the aforementioned markers can be used in mutants in whom these genes are not functional since, for example, they have been deleted by conventional methods. Furthermore, nucleic acid molecules, which encode a selectable marker, can be introduced into a host cell on the same vector as those, which encode the polypeptides of the invention or used in the process or else in a separate vector. Cells which have been transfected stably with the nucleic acid introduced can be identified for example by selection (for example, cells which have integrated the selectable marker survive whereas the other cells die).

[0494] Since the marker genes, as a rule specifically the gene for resistance to antibiotics and herbicides, are no longer required or are undesired in the transgenic host cell once the nucleic acids have been introduced successfully, the process according to the invention for introducing the nucleic acids advantageously employs techniques which enable the removal, or excision, of these marker genes. One such a method is what is known as cotransformation. The cotransformation method employs two vectors simultaneously for the transformation, one vector bearing the nucleic acid according to the invention and a second bearing the marker gene(s). A large proportion of transformants receives or, in the case of plants, comprises (up to 40% of the transformants and above), both vectors. In case of transformation with Agrobacteria, the transformants usually receive only a part of the vector, the sequence flanked by the T-DNA, which usually represents the expression cassette. The marker genes can subsequently be removed from the transformed plant by performing crosses. In another method, marker genes integrated into a transposon are used for the transformation together with desired nucleic acid (known as the Ac/Ds technology). The transformants can be crossed with a transposase resource or the transformants are transformed with a nucleic acid construct conferring expression of a transposase, transiently or stable. In some cases (approx. 10%), the transposon jumps out of the genome of the host cell once transformation has taken place successfully and is lost. In a further number of cases, the transposon jumps to a different location. In these cases, the marker gene must be eliminated by performing crosses. In microbiology, techniques were developed which make possible, or facilitate, the detection of such events. A further advantageous method relies on what are known as recombination systems, whose advantage is that elimination by crossing can be dispensed with. The best-known system of this type is what is known as the Cre/lox system. Cre1 is a recombinase, which removes the sequences located between the loxP sequences. If the marker gene is integrated between the loxP sequences, it is removed, once transformation has taken place successfully, by expression of the recombinase. Further recombination systems are the HIN/HIX, FLP/FRT and REP/STB system (Tribble et al., J. Biol. Chem., 275, 2000: 22255-22267; Velmurugan et al., J. Cell Biol., 149, 2000: 553-566). A site-specific integration into the plant genome of the nucleic acid sequences according to the invention is possible. Naturally, these methods can also be applied to microorganisms such as yeast, fungi or bacteria.

[0495] Agrobacteria transformed with an expression vector according to the invention may also be used in the manner known per se for the transformation of plants such as experimental plants like Arabidopsis or crop plants, such as, for example, cereals, maize, oats, rye, barley, wheat, soya, rice, cotton, sugarbeet, canola, sunflower, flax, hemp, potato, tobacco, tomato, carrot, bell peppers, oilseed rape, tapioca, cassaya, arrow root, tagetes, alfalfa, lettuce and the various tree, nut, and grapevine species, in particular oil-containing crop plants such as soya, peanut, castor-oil plant, sunflower, maize, cotton, flax, oilseed rape, cotton, coconut, oil palm, safflower (Carthamus tinctorius) or cocoa beans, for example by bathing scarified leaves or leaf segments in an agrobacterial solution and subsequently growing them in suitable media.

[0496] In addition to the transformation of somatic cells, which then has to be regenerated into intact plants, it is also possible to transform the cells of plant meristems and in particular those cells which develop into gametes. In this case, the transformed gametes follow the natural plant development, giving rise to transgenic plants. Thus, for example, seeds of Arabidopsis are treated with agrobacteria and seeds are obtained from the developing plants of which a certain proportion is transformed and thus transgenic (Feldman, K A and Marks M D (1987). Mol Gen Genet. 208:274-289; Feldmann K (1992). In: C Koncz, N-H Chua and J Shell, eds, Methods in Arabidopsis Research. Word Scientific, Singapore, pp. 274-289). Alternative methods are based on the repeated removal of the influorescences and incubation of the excision site in the center of the rosette with transformed agrobacteria, whereby transformed seeds can likewise be obtained at a later point in time (Chang (1994). Plant J. 5: 551-558; Katavic (1994). Mol Gen Genet, 245: 363-370). However, an especially effective method is the vacuum infiltration method with its modifications such as the “floral dip” method. In the case of vacuum infiltration of Arabidopsis, intact plants under reduced pressure are treated with an agrobacterial suspension (Bechthold, N (1993). C R Acad Sci Paris Life Sci, 316: 1194-1199), while in the case of the “floral dip” method the developing floral tissue is incubated briefly with a surfactant-treated agrobacterial suspension (Clough, S J und Bent, A F (1998). The Plant J. 16, 735-743). A certain proportion of transgenic seeds are harvested in both cases, and these seeds can be distinguished from nontransgenic seeds by growing under the above-described selective conditions. In addition the stable transformation of plastids is of advantages because plastids are inherited maternally is most crops reducing or eliminating the risk of transgene flow through pollen. The transformation of the chloroplast genome is generally achieved by a process, which has been schematically displayed in Klaus et al., 2004 (Nature Biotechnology 22(2), 225-229). Briefly the sequences to be transformed are cloned together with a selectable marker gene between flanking sequences homologous to the chloroplast genome. These homologous flanking sequences direct site specific integration into the plastome. Plastidal transformation has been described for many different plant species and an overview can be taken from Bock (2001) Transgenic plastids in basic research and plant biotechnology. J Mol. Biol. 2001 Sep. 21; 312 (3): 425-38 or Maliga, P (2003) Progress towards commercialization of plastid transformation technology. Trends Biotechnol. 21, 20-28. Further biotechnological progress has recently been reported in form of marker free plastid transformants, which can be produced by a transient cointegrated maker gene (Klaus et al., 2004, Nature Biotechnology 22 (2), 225-229).

[0497] The genetically modified plant cells can be regenerated via all methods with which the skilled worker is familiar. Suitable methods can be found in the abovementioned publications by S. D. Kung and R. Wu, Potrykus or Höfgen and Willmitzer.

[0498] Accordingly, the present invention thus also relates to a plant cell comprising the nucleic acid construct according to the invention, the nucleic acid molecule according to the invention or the vector according to the invention.

[0499] Accordingly the present invention relates to any cell transgenic for any nucleic acid characterized as part of the invention, e.g. conferring the increase of nitrogen or nitrogen containing compounds in a cell or an organism or a part thereof, e.g. the nucleic acid molecule of the invention or the nucleic acid molecule used in the method of the invention, the nucleic acid construct of the invention, the antisense molecule of the invention, the vector of the invention or a nucleic acid molecule encoding the polypeptide of the invention or the polypeptide used in the method of the invention, e.g. the polypeptide as indicated in Table II, columns 5 or 7. Due to the above mentioned activity nitrogen or nitrogen containing compound content in a cell or an organism is increased. For example, due to modulation or manipulation, the cellular activity of the polypeptide of the invention or the polypeptide used in the method of the invention or the nucleic acid molecule of the invention or the nucleic acid molecule used in the method of the invention is increased, e.g. due to an increased expression or specific activity of the subject matters of the invention in a cell or an organism or a part thereof. In one embodiment, transgenic for a polypeptide having an activity of a polypeptide as indicated in Table II, columns 5 or 7 means herein that due to modulation or manipulation of the genome, an activity as annotated for a polypeptide as indicated in Table II, column 3, e.g. having a sequence as indicated in Table II, columns 5 or 7 is increased in a cell or an organism or a part thereof. Examples are described above in context with the process of the invention

[0500] “Transgenic”, for example regarding a nucleic acid molecule, an nucleic acid construct or a vector comprising said nucleic acid molecule or an organism transformed with said nucleic acid molecule, nucleic acid construct or vector, refers to all those subjects originating by recombinant methods in which either
[0501] a) the nucleic acid sequence, or
[0502] b) a genetic control sequence linked operably to the nucleic acid sequence, for example a promoter, or
[0503] c) (a) and (b)
   are not located in their natural genetic environment or have been modified by recombinant methods, an example of a modification being a substitution, addition, deletion, inversion or insertion of one or more nucleotide residues. Natural genetic environment refers to the natural chromosomal locus in the organism of origin, or to the presence in a genomic library. In the case of a genomic library, the natural genetic environment of the nucleic acid sequence is preferably retained, at least in part. The environment flanks the nucleic acid sequence at least at one side and has a sequence of at least 50 bp, preferably at least 500 bp, especially preferably at least 1000 bp, very especially preferably at least 5000 bp, in length.

[0504] A naturally occurring expression cassette—for example the naturally occurring combination of a promoter of a polypeptide of the invention with the corresponding protein-encoding sequence—becomes a transgenic expression cassette when it is modified by non-natural, synthetic “artificial” methods such as, for example, mutagenization. Such methods have been described (U.S. Pat. No. 5,565,350; WO 00/15815; also see above).

[0505] Further, the plant cell, plant tissue or plant can also be transformed such that further enzymes and proteins are (over)expressed which expression supports an increase of nitrogen or nitrogen containing compounds.

[0506] However, transgenic also means that the nucleic acids according to the invention are located at their natural position in the genome of an organism, but that the sequence has been modified in comparison with the natural sequence and/or that the regulatory sequences of the natural sequences have been modified. Preferably, transgenic/recombinant is to be understood as meaning the transcription of the nucleic acids used in the process according to the invention occurs at a non-natural position in the genome, that is to say the expression of the nucleic acids is homologous or, preferably, heterologous. This expression can be transiently or of a sequence integrated stably into the genome.

[0507] The term “transgenic plants” used in accordance with the invention also refers to the progeny of a transgenic plant, for example the T₁, T₂, T₃ and subsequent plant generations or the BC₁, BC₂, BC₃ and subsequent plant generations. Thus, the transgenic plants according to the invention can be raised and selfed or crossed with other individuals in order to obtain further transgenic plants according to the invention. Transgenic plants may also be obtained by propagating transgenic plant cells vegetatively. The present invention also relates to transgenic plant material, which can be derived from a transgenic plant population according to the invention. Such material includes plant cells and certain tissues, organs and parts of plants in all their manifestations, such as seeds, leaves, anthers, fibers, tubers, roots, root hairs, stems, embryo, calli, cotelydons, petioles, harvested material, plant tissue, reproductive tissue and cell cultures, which are derived from the actual transgenic plant and/or can be used for bringing about the transgenic plant.

[0508] Any transformed plant obtained according to the invention can be used in a conventional breeding scheme or in in vitro plant propagation to produce more transformed plants with the same characteristics and/or can be used to introduce the same characteristic in other varieties of the same or related species. Such plants are also part of the invention. Seeds obtained from the transformed plants genetically also contain the same characteristic and are part of the invention. As mentioned before, the present invention is in principle applicable to any plant and crop that can be transformed with any of the transformation method known to those skilled in the art.

[0509] In an especially preferred embodiment, the organism, the host cell, plant cell, plant, microorganism or plant tissue according to the invention is transgenic.

[0510] Accordingly, the invention therefore relates to transgenic organisms transformed with at least one nucleic acid molecule, nucleic acid construct or vector according to the invention, and to cells, cell cultures, tissues, parts—such as, for example, in the case of plant organisms, plant tissue, for example leaves, roots and the like—or propagation material derived from such organisms, or intact plants. The terms “recombinant (host)”, and “transgenic (host)” are used interchangeably in this context. Naturally, these terms refer not only to the host organism or target cell in question, but also to the progeny, or potential progeny, of these organisms or cells. Since certain modifications may occur in subsequent generations owing to mutation or environmental effects, such progeny is not necessarily identical with the parental cell, but still comes within the scope of the term as used herein.

[0511] Suitable organisms for the process according to the invention or as hosts are all these eukaryotic or prokaryotic organisms, which are capable of accumulating or assimilating nitrogen or nitrogen containing compounds respectively. The organisms used as hosts are microorganisms, such as bacteria, fungi, yeasts or algae, non-human animals, or plants, such as dictotyledonous or monocotyledonous plants.

[0512] In principle all plants can be used as host organism, especially the plants mentioned above as source organism. Preferred transgenic plants are, for example, selected from the families Aceraceae, Anacardiaceae, Apiaceae, Asteraceae, Brassicaceae, Cactaceae, Cucurbitaceae, Euphorbiaceae, Fabaceae, Malvaceae, Nymphaeaceae, Papaveraceae, Rosaceae, Salicaceae, Solanaceae, Arecaceae, Bromeliaceae, Cyperaceae, Iridaceae, Liliaceae, Orchidaceae, Gentianaceae, Labiaceae, Magnoliaceae, Ranunculaceae, Carifolaceae, Rubiaceae, Scrophulariaceae, Caryophyllaceae, Ericaceae, Polygonaceae, Violaceae, Juncaceae or Poaceae and preferably from a plant selected from the group of the families Apiaceae, Asteraceae, Brassicaceae, Cucurbitaceae, Fabaceae, Papaveraceae, Rosaceae, Solanaceae, Liliaceae or Poaceae. Preferred are crop plants such as plants advantageously selected from the group of the genus peanut, oilseed rape, canola, sunflower, safflower, olive, sesame, hazelnut, almond, avocado, bay, pumpkin/squash, linseed, soya, pistachio, borage, maize, wheat, rye, oats, sorghum and millet, triticale, rice, barley, cassaya, potato, sugarbeet, egg plant, alfalfa, and perennial grasses and forage plants, oil palm, vegetables (brassicas, root vegetables, tuber vegetables, pod vegetables, fruiting vegetables, onion vegetables, leafy vegetables and stem vegetables), buckwheat, Jerusalem artichoke, broad bean, vetches, lentil, dwarf bean, lupin, clover and Lucerne for mentioning only some of them.

[0513] Preferred plant cells, plant organs, plant tissues or parts of plants originate from the under source organism mentioned plant families, preferably from the abovementioned plant genus, more preferred from abovementioned plants species.

[0514] Transgenic plants comprising the nitrogen or nitrogen containing compounds, for example the amino acids or proteins synthesized in the process according to the invention can be marketed directly without isolation of the compounds synthesized. In the process according to the invention, plants are understood as meaning all plant parts, plant organs such as leaf, stalk, root, tubers or seeds or propagation material or harvested material or the intact plant. In this context, the seed encompasses all parts of the seed such as the seed coats, epidermal cells, seed cells, endosperm or embryonic tissue. The nitrogen accumulated or assimilated in the process according to the invention may, however, also be isolated from the plant in the form of their free amino acids or bound in proteins. Amino acids produced by this process can be harvested by harvesting the organisms either from the culture in which they grow or from the field. This can be done via expressing, grinding and/or extraction, salt precipitation and/or ion-exchange chromatography of the plant parts, preferably the plant seeds, plant fruits, plant tubers and the like.

[0515] In yet another aspect, the invention also relates to harvestable parts and to propagation material of the transgenic plants according to the invention which either contain transgenic plant cells expressing a nucleic acid molecule according to the invention or which contains cells which show an increased cellular activity of the polypeptide of the invention or the polypeptide used in the method of the invention, e.g. an increased expression level or higher activity of the described protein.

[0516] Harvestable parts can be in principle any useful parts of a plant, for example, flowers, pollen, seedlings, tubers, leaves, stems, fruit, seeds, roots etc. Propagation material includes, for example, seeds, fruits, cuttings, seedlings, tubers, rootstocks etc. Preferred are seeds, fruits, seedlings or tubers as harvestable or propagation material.

[0517] The invention furthermore relates to the use of the transgenic organisms according to the invention and of the cells, cell cultures, parts—such as, for example, roots, leaves and the like as mentioned above in the case of transgenic plant organisms—derived from them, and to transgenic propagation material such as seeds or fruits and the like as mentioned above, for the production of foodstuffs or feeding stuffs, pharmaceuticals or fine chemicals, preferably feedstuffs.

[0518] Accordingly in another embodiment, the present invention relates to the use of the nucleic acid molecule, the organism, e.g. the microorganism, the plant, plant cell or plant tissue, the vector, or the polypeptide of the present invention for making fatty acids, carotenoids, isoprenoids, vitamins, lipids, wax esters, (poly)saccharides and/or polyhydroxyalkanoates, and/or its metabolism products, in particular, steroid hormones, cholesterol, prostaglandin, triacylglycerols, bile acids and/or ketone bodies producing cells, tissues and/or plants. There are a number of mechanisms by which the yield, production, and/or efficiency of production of fatty acids, carotenoids, isoprenoids, vitamins, wax esters, lipids, (poly)saccharides and/or polyhydroxyalkanoates, and/or its metabolism products, in particular, steroid hormones, cholesterol, triacylglycerols, prostaglandin, bile acids and/or ketone bodies or further of above defined fine chemicals incorporating such an altered protein can be affected. In the case of plants, by e.g. increasing the expression of acetyl-CoA which is the basis for many products, e.g., fatty acids, carotenoids, isoprenoids, vitamines, lipids, (poly)saccharides, wax esters, and/or polyhydroxyalkanoates, and/or its metabolism products, in particular, prostaglandin, steroid hormones, cholesterol, triacylglycerols, bile acids and/or ketone bodies in a cell, it may be possible to increase the amount of the produced said compounds thus permitting greater ease of harvesting and purification or in case of plants more efficient partitioning. Further, one or more of said metabolism products, increased amounts of the cofactors, precursor molecules, and intermediate compounds for the appropriate biosynthetic pathways maybe required. Therefore, by increasing the number and/or activity of transporter proteins involved in the import of nutrients, such as carbon sources (i.e., sugars), nitrogen sources (i.e., amino acids, ammonium salts), phosphate, and sulfur, it may be possible to improve the production of acetyl CoA and its metabolism products as mentioned above, due to the removal of any nutrient supply limitations on the biosynthetic process. In particular, it may be possible to increase the yield, production, and/or efficiency of production of said compounds, e.g. fatty acids, carotenoids, isoprenoids, vitamins, was esters, lipids, (poly)saccharides, and/or polyhydroxyalkanoates, and/or its metabolism products, in particular, steroid hormones, cholesterol, prostaglandin, triacylglycerols, bile acids and/or ketone bodies molecules etc. in plants.

[0519] The organisms, preferably plants of the present invention show enhanced nitrogen assimilation, accumulation and/or utilization even under conditions of limited nitrogen. In consequence the organims, preferably plants of the present invention show also enhanced growth, biomass and/or yield, preferably under conditions of limited nitrogen.

[0520] In one embodiment, the present invention relates to a method for the identification of a gene product conferring an enhanced nitrogen assimilation, accumulation and/or utilization in a organism, comprising the following steps:

[0521] contacting, e.g. hybridising, the nucleic acid molecules of a sample, e.g. cells, tissues, plants or microorganisms or a nucleic acid library, which can contain a candidate gene encoding a gene product conferring an enhanced nitrogen assimilation, accumulation and/or utilization after expression, with the nucleic acid molecule of the present invention;

[0522] identifying the nucleic acid molecules, which hybridize under relaxed stringent conditions with the nucleic acid molecule of the present invention in particular to a nucleic acid molecule sequence as indicated in Table I, columns 5 or 7, preferably in Table I B, columns 5 or 7 and, optionally, isolating the full length cDNA clone or complete genomic clone;

[0523] introducing the candidate nucleic acid molecules in host cells, preferably in a plant cell or a microorganism, appropriate for enhanced nitrogen assimilation, accumulation and/or utilization;
[0524] a) expressing the identified nucleic acid molecules in the host cells;
[0525] b) assaying enhanced nitrogen assimilation, accumulation and/or utilization levels in the host cells; and
[0526] c) identifying the nucleic acid molecule and its gene product which expression confers an enhanced nitrogen assimilation, accumulation and/or utilization in the host cell after expression compared to the wild type.

[0527] Relaxed hybridisation conditions are: After standard hybridisation procedures washing steps can be performed at low to medium stringency conditions usually with washing conditions of 40°-55° C. and salt conditions between 2×SSC and 0.2×SSC with 0.1% SDS in comparison to stringent washing conditions as e.g. 60°-68° C. with 0.1% SDS. Further examples can be found in the references listed above for the stringent hybridization conditions. Usually washing steps are repeated with increasing stringency and length until a useful signal to noise ratio is detected and depend on many factors as the target, e.g. its purity, GC-content, size etc, the probe, e.g. its length, is it a RNA or a DNA probe, salt conditions, washing or hybridisation temperature, washing or hybridisation time etc.

[0528] In an other embodiment, the present invention relates to a method for the identification of a gene product conferring an enhanced nitrogen assimilation, accumulation and/or utilization in a organism, comprising the following steps:

[0529] identifying nucleic acid molecules of an organism; which can contain a candidate gene encoding a gene product conferring an enhanced nitrogen assimilation, accumulation and/or utilization after expression, which are at least 20%, preferably 25%, more preferably 30%, even more preferred are 35%. 40% or 50%, even more preferred are 60%, 70% or 80%, most preferred are 90% or 95% or more homology to the nucleic acid molecule of the present invention, for example via homology search in a data bank;

[0530] introducing the candidate nucleic acid molecules in host cells, preferably in a plant cells or microorganisms, appropriate enhancing nitrogen assimilation, accumulation and/or utilization;
[0531] a) expressing the identified nucleic acid molecules in the host cells;
[0532] b) assaying the enhanced nitrogen assimilation, accumulation and/or utilization level in the host cells; and
[0533] c) identifying the nucleic acid molecule and its gene product which expression confers an enhanced nitrogen assimilation, accumulation and/or utilization in the host cell after expression compared to the wild type.
   [0534] Eventually gene products conferring the increase in enhanced nitrogen assimilation, accumulation and/or utilization can also be identify according to a identical or similar 3D structure in step (a) and by the above described method.

[0535] The nucleic acid molecules identified can then be used for the production of or organisms with enhanced nitrogen assimilation, accumulation and/or utilization in the same way as the nucleic acid molecule of the present invention.

[0536] Accordingly, in one embodiment, the present invention relates to a process for the accumulation or production of nitrogen or nitrogen containing compounds respectively, comprising (a) identifying a nucleic acid molecule according to aforementioned steps (a) to (f) or (a) to (e) and recovering the free or bound nitrogen containing compounds, especially proteins, from a organism having an increased cellular activity of a polypeptide encoded by the isolated nucleic acid molecule compared to a wild type.

[0537] Furthermore, in one embodiment, the present invention relates to a method for the identification of a compound stimulating enhanced nitrogen assimilation, accumulation and/or utilization to said plant comprising:
[0538] a) contacting cells which express the polypeptide of the present invention or its mRNA with a candidate compound under cell cultivation conditions;
[0539] b) assaying an increase in expression of said polypeptide or said mRNA;
[0540] c) comparing the expression level to a standard response made in the absence of said candidate compound; whereby, an increased expression over the standard indicates that the compound is stimulating enhanced nitrogen assimilation, accumulation and/or utilization.

[0541] Furthermore, in one embodiment, the present invention relates to a method for the screening for agonists or an antagonist of the activity of the polypeptide of the present invention or used in the process of the present invention comprising:
[0542] a) contacting cells, tissues, plants or microorganisms which express the polypeptide according to the invention with a candidate compound or a sample comprising a plurality of compounds under conditions which permit the expression the polypeptide of the present invention or used in the process of the present invention;
[0543] b) assaying enhanced nitrogen assimilation, accumulation and/or utilization level or the polypeptide expression level in the cell, tissue, plant or microorganism or the media the cell, tissue, plant or microorganisms is cultured or maintained in; and
[0544] c) identifying a agonist or antagonist by comparing the measured nitrogen assimilation, accumulation and/or utilization level or polypeptide of the invention or used in the invention expression level with a standard nitrogen assimilation, accumulation and/or utilization or polypeptide expression level measured in the absence of said candidate compound or a sample comprising said plurality of compounds, whereby an increased level over the standard indicates that the compound or the sample comprising said plurality of compounds is an agonist and a decreased level over the standard indicates that the compound or the sample comprising said plurality of compounds is an antagonist.

[0545] Furthermore, in one embodiment, the present invention relates to process for the identification of a compound conferring enhanced nitrogen assimilation, accumulation and/or utilization in a plant or microorganism, comprising the steps:
[0546] a) culturing a cell or tissue or microorganism or maintaining a plant expressing the polypeptide according to the invention or a nucleic acid molecule encoding said polypeptide and a readout system capable of interacting with the polypeptide under suitable conditions which permit the interaction of the polypeptide with said readout system in the presence of a compound or a sample comprising a plurality of compounds and capable of providing a detectable signal in response to the binding of a compound to said polypeptide under conditions which permit the expression of said readout system and the polypeptide of the present invention or used in the process of the invention; and
[0547] b) identifying if the compound is an effective agonist by detecting the presence or absence or increase of a signal produced by said readout system.

[0548] The screen for a gene product or an agonist conferring an increase in nitrogen or nitrogen containing compounds production can be performed by growth of an organism for example a microorganism in the presence of growth reducing amounts of an inhibitor of the accumulation or synthesis of nitrogen or nitrogen containing compounds respectively. Better growth, e.g. higher dividing rate or high dry mass in comparison to the control under such conditions would identify a gene or gene product or an agonist conferring an enhanced nitrogen assimilation, accumulation and/or utilization.

[0549] One can think to screen for enhanced nitrogen assimilation, accumulation and/or utilization by for example searching for a resistance to a drug blocking the synthesis of nitrogen or nitrogen containing compounds and looking whether this effect is dependent on the activity or expression of a polypeptide as indicated in Table II, columns 5 or 7 or a homolog thereof, e.g. comparing the phenotype of nearly identical organisms with low and high activity of a protein as indicated in Table II, columns 5 or 7 after incubation with the drug.

[0550] Said compound may be chemically synthesized or microbiologically produced and/or comprised in, for example, samples, e.g., cell extracts from, e.g., plants, animals or microorganisms, e.g. pathogens. Furthermore, said compound(s) may be known in the art but hitherto not known to be capable of suppressing or activating the polypeptide of the present invention. The reaction mixture may be a cell free extract or may comprise a cell or tissue culture. Suitable set ups for the method of the invention are known to the person skilled in the art and are, for example, generally described in Alberts et al., Molecular Biology of the Cell, third edition (1994), in particular Chapter 17. The compounds may be, e.g., added to the reaction mixture, culture medium, injected into the cell or sprayed onto the plant.

[0551] If a sample containing a compound is identified in the method of the invention, then it is either possible to isolate the compound from the original sample identified as containing the compound capable of activating or increasing the content of nitrogen or nitrogen containing compounds in an organism or part thereof, or one can further subdivide the original sample, for example, if it consists of a plurality of different compounds, so as to reduce the number of different substances per sample and repeat the method with the subdivisions of the original sample. Depending on the complexity of the samples, the steps described above can be performed several times, preferably until the sample identified according to the method of the invention only comprises a limited number of or only one substance(s). Preferably said sample comprises substances of similar chemical and/or physical properties, and most preferably said substances are identical. Preferably, the compound identified according to the above described method or its derivative is further formulated in a form suitable for the application in plant breeding or plant cell and tissue culture.

[0552] The compounds which can be tested and identified according to a method of the invention may be expression libraries, e.g., cDNA expression libraries, peptides, proteins, nucleic acids, antibodies, small organic compounds, hormones, peptidomimetics, PNAs or the like (Milner, Nature Medicine 1 (1995), 879-880; Hupp, Cell 83 (1995), 237-245; Gibbs, Cell 79 (1994), 193-198 and references cited supra). Said compounds can also be functional derivatives or analogues of known inhibitors or activators. Methods for the preparation of chemical derivatives and analogues are well known to those skilled in the art and are described in, for example, Beilstein, Handbook of Organic Chemistry, Springer edition New York Inc., 175 Fifth Avenue, New York, N.Y. 10010 U.S.A. and Organic Synthesis, Wiley, New York, USA. Furthermore, said derivatives and analogues can be tested for their effects according to methods known in the art. Furthermore, peptidomimetics and/or computer aided design of appropriate derivatives and analogues can be used, for example, according to the methods described above. The cell or tissue that may be employed in the method of the invention preferably is a host cell, plant cell or plant tissue of the invention described in the embodiments hereinbefore.

[0553] Thus, in a further embodiment the invention relates to a compound obtained or identified according to the method for identifying an agonist of the invention said compound being an agonist of the polypeptide of the present invention or used in the process of the present invention.

[0554] Accordingly, in one embodiment, the present invention further relates to a compound identified by the method for identifying a compound of the present invention.

[0555] Said compound is, for example, a homologous of the polypeptide of the present invention. Homologues of the polypeptide of the present invention can be generated by mutagenesis, e.g., discrete point mutation or truncation of the polypeptide of the present invention. As used herein, the term “homologue” refers to a variant form of the protein, which acts as an agonist of the activity of the polypeptide of the present invention. An agonist of said protein can retain substantially the same, or a subset, of the biological activities of the polypeptide of the present invention. In particular, said agonist confers the increase of the expression level of the polypeptide of the present invention and/or the expression of said agonist in an organisms or part thereof confers the enhanced nitrogen assimilation, accumulation and/or utilization in the organism or part thereof.

[0556] In one embodiment, the invention relates to an antibody specifically recognizing the compound or agonist of the present invention.

[0557] The invention also relates to a diagnostic composition comprising at least one of the aforementioned nucleic acid molecules, vectors, proteins, antibodies or compounds of the invention and optionally suitable means for detection.

[0558] The diagnostic composition of the present invention is suitable for the isolation of mRNA from a cell and contacting the mRNA so obtained with a probe comprising a nucleic acid probe as described above under hybridizing conditions, detecting the presence of mRNA hybridized to the probe, and thereby detecting the expression of the protein in the cell. Further methods of detecting the presence of a protein according to the present invention comprise immunotechniques well known in the art, for example enzyme linked immunosorbent assay. Furthermore, it is possible to use the nucleic acid molecules according to the invention as molecular markers or primer in plant breeding. Suitable means for detection are well known to a person skilled in the arm, e.g. buffers and solutions for hydridization assays, e.g. the aforementioned solutions and buffers, further and means for Southern-, Western-, Northern—etc.—blots, as e.g. described in Sambrook et al. are known.

[0559] In another embodiment, the present invention relates to a kit comprising the nucleic acid molecule, the vector, the host cell, the polypeptide, the antisense nucleic acid, the antibody, plant cell, the plant or plant tissue, the harvestable part, the propagation material and/or the compound or agonist or antagonists identified according to the method of the invention.

[0560] The compounds of the kit of the present invention may be packaged in containers such as vials, optionally with/in buffers and/or solution. If appropriate, one or more of said components might be packaged in one and the same container. Additionally or alternatively, one or more of said components might be adsorbed to a solid support as, e.g. a nitrocellulose filter, a glass plate, a chip, or a nylon membrane or to the well of a micro titerplate. The kit can be used for any of the herein described methods and embodiments, e.g. for the production of the host cells, transgenic plants, pharmaceutical compositions, detection of homologous sequences, identification of antagonists or agonists, as food or feed or as a supplement thereof, as supplement for the treating of plants, etc.

[0561] Further, the kit can comprise instructions for the use of the kit for any of said embodiments, in particular for the use for producing organisms or part thereof having enhanced nitrogen assimilation, accumulation and/or utilization.

[0562] In one embodiment said kit comprises further a nucleic acid molecule encoding one or more of the aforementioned protein, and/or an antibody, a vector, a host cell, an antisense nucleic acid, a plant cell or plant tissue or a plant.

[0563] In a further embodiment, the present invention relates to a method for the production of a agricultural composition providing the nucleic acid molecule, the vector or the polypeptide of the invention or the polypeptide used in the method of the invention or comprising the steps of the method according to the invention for the identification of said compound, agonist or antagonist; and formulating the nucleic acid molecule, the vector or the polypeptide of the invention or the polypeptide used in the method of the invention or the agonist, or compound identified according to the methods or processes of the present invention or with use of the subject matters of the present invention in a form applicable as plant agricultural composition.

[0564] In another embodiment, the present invention relates to a method for the production of a “nitrogen containing compounds”-production supporting plant culture composition comprising the steps of the method for of the present invention; and formulating the compound identified in a form acceptable as agricultural composition.

[0565] Under “acceptable as agricultural composition” is understood, that such a composition is in agreement with the laws regulating the content of fungicides, plant nutrients, herbicides, etc. Preferably such a composition is without any harm for the protected plants and the animals (humans included) fed therewith.

[0566] The present invention also pertains to several embodiments relating to further uses and methods. The nucleic acid molecule, polypeptide, protein homologues, fusion proteins, primers, vectors, host cells, described herein can be used in one or more of the following methods: identification of plants useful for nitrogen or nitrogen containing compounds production as mentioned and related organisms; mapping of genomes; identification and localization of sequences of interest; evolutionary studies; determination of regions required for function; modulation of an activity.

[0567] The nucleic acid molecules of the present invention have a variety of uses. First, they may be used to identify an organism or a close relative thereof. Also, they may be used to identify the presence thereof or a relative thereof in a mixed population of microorganisms or plants. By probing the extracted genomic DNA of a culture of a unique or mixed population of plants under stringent conditions with a probe spanning a region of the gene of the present invention which is unique to this, one can ascertain whether the present invention has been used or whether it or a close relative is present.

[0568] Further, the nucleic acid molecule of the invention or the nucleic acid molecule used in the method of the invention may be sufficiently homologous to the sequences of related species such that these nucleic acid molecules may serve as markers for the construction of a genomic map in related organism.

[0569] Accordingly, the present invention relates to a method for breeding plants with enhanced nitrogen assimilation, accumulation and/or utilization, comprising
[0570] (a providing a first plant variety produced according to the process of the invention preferably (over) expressing the nucleic acid molecule of the invention or the nucleic acid molecule used in the method of the invention;
[0571] (b crossing the first plant variety with a second plant variety; and
   selecting the offspring plants which overaccumulates nitrogen or overproduce nitrogen containing compounds by means of analysis the distribution of a molecular marker in the offspring representing the first plant variety and its capability to (over) accumulate nitrogen or (over) produce nitrogen containing compounds.

[0572] Further, the nucleic acid molecule disclosed herein, in particular the nucleic acid molecule shown column 5 or 7 of Table I A or B, may be sufficiently homologous to the sequences of related species such that these nucleic acid molecules may serve as markers for the construction of a genomic map in related organism or for association mapping. Furthermore natural variation in the genomic regions corresponding to nucleic acids disclosed herein, in particular the nucleic acid molecule shown column 5 or 7 of Table I A or B, or homologous thereof may lead to variation in the activity of the proteins disclosed herein, in particular the proteins comprising polypeptides as shown in column 5 or 7 of Table II A or B or comprising the consensus sequence or the polypeptide motif as shown in column 7 of Table IV, and their homolgous and in consequence in natural variation in the production of nitrogen or nitrogen containing compounds. In consequence natural variation eventually also exists in form of more active allelic variants leading already to a relative increase in the production of nitrogen or nitrogen containing compounds. Different variants of the nucleic acids molecule disclosed herein, in particular the nucleic acid comprising the nucleic acid molecule as shown column 5 or 7 of Table I A or B, which corresponds to different production levels of nitrogen or nitrogen containing compounds can be identified and used for marker assisted breeding for increase production of nitrogen or nitrogen containing compounds.

[0573] Accordingly, the present invention relates to a method for breeding plants for increased production of nitrogen or nitrogen containing compounds, comprising

a) selecting a first plant variety with increased production of nitrogen or nitrogen containing compounds based on increased expression of a nucleic acid of the invention as disclosed herein, in particular of a nucleic acid molecule comprising a nucleic acid molecule as shown in column 5 or 7 of Table I A or B or a polypeptide comprising a polypeptide as shown in column 5 or 7 of Table II A or B or comprising a consensus sequence or a polypeptide motif as shown in column 7 of Table IV, or a homologue thereof as described herein;
b) associating the production level of nitrogen or nitrogen containing compounds with the expression level or the genomic structure of a gene encoding said polypeptide or said nucleic acid molecule;
c) crossing the first plant variety with a second plant variety, which significantly differs in its production level of nitrogen or nitrogen containing compounds and
d) identifying, which of the offspring varieties has got increased production level for nitrogen or nitrogen containing compounds by the expression level of said polypeptide or nucleic acid molecule or the genomic structure of the genes encoding said polypeptide or nucleic acid molecule of the invention.

[0574] In one embodiment, the expression level of the gene according to step (b) is increased

[0575] Details about the use of molecular markers in breeding can be found in Kumar et al., 1999 (Biotech Adv., 17:143-182) and Peleman and van der Voort 2003 (Trends Plant Sci. 2003 July; 8(7):330-334)

[0576] The molecular marker can e.g. relate to the nucleic acid molecule of the invention or the nucleic acid molecule used in the method of the invention and/or its expression level. Accordingly, the molecular marker can be a probe or a PCR primer set useful for identification of the genomic existence or genomic localisation of the nucleic acid molecule of the invention or the nucleic acid molecule used in the method of the invention, e.g. in a Southern blot analysis or a PCR or its expression level, i.g. in a Northern Blot analysis or a quantitative PCR.

[0577] Accordingly, in one embodiment, the present invention relates to the use of the nucleic acid molecule of the present invention or encoding the polypeptide of the present invention as molecular marker for breeding, especially for breeding for a high or low respective fine chemical production.

[0578] The nucleic acid molecules of the invention are also useful for evolutionary and protein structural studies. By comparing the sequences of the invention or used in the process of the invention to those encoding similar enzymes from other organisms, the evolutionary relatedness of the organisms can be assessed. Similarly, such a comparison permits an assessment of which regions of the sequence are conserved and which are not, which may aid in determining those regions of the protein which are essential for the functioning of the enzyme. This type of determination is of value for protein engineering studies and may give an indication of what the protein can tolerate in terms of mutagenesis without losing function.

[0579] Accordingly, the nucleic acid molecule of the invention or the nucleic acid molecule used in the method of the invention can be used for the identification of other nucleic acids conferring an increase of nitrogen or nitrogen containing compounds after expression.

[0580] Further, the nucleic acid molecule of the invention or the nucleic acid molecule used in the method of the invention or a fragment of a gene conferring the expression of the polypeptide of the invention or the polypeptide used in the method of the invention, preferably comprising the nucleic acid molecule of the invention, can be used for marker assisted breeding or association mapping of nitrogen or nitrogen containing compounds derived traits.

[0581] Accordingly, the nucleic acid of the invention, the polypeptide of the invention or the polypeptide used in the method of the invention, the nucleic acid construct of the invention, the organisms, the host cell, the microorganisms, the plant, plant tissue, plant cell, or the part thereof of the invention, the vector of the invention, the agonist identified with the method of the invention, the nucleic acid molecule identified with the method of the present invention, can be used for the production of N-containing compound or of the N-containing compound and one or more other fine chemicals.

[0582] Accordingly, the nucleic acid of the invention, or the nucleic acid molecule identified with the method of the present invention or the complement sequences thereof, the polypeptide of the invention or the polypeptide used in the method of the invention, the nucleic acid construct of the invention, the organisms, the host cell, the microorganisms, the plant, plant tissue, plant cell, or the part thereof of the invention, the vector of the invention, the antagonist identified with the method of the invention, the antibody of the present invention, the antisense molecule of the present invention, can be used for the reduction of nitrogen or nitrogen containing compounds in a organism or part thereof, e.g. in a cell.

[0583] Further, the nucleic acid of the invention, the polypeptide of the invention or the polypeptide used in the method of the invention, the nucleic acid construct of the invention, the organisms, the host cell, the microorganisms, the plant, plant tissue, plant cell, or the part thereof of the invention, the vector of the invention, the antagonist or the agonist identified with the method of the invention, the antibody of the present invention, the antisense molecule of the present invention or the nucleic acid molecule identified with the method of the present invention, can be used for the preparation of an agricultural composition.

[0584] Furthermore, the nucleic acid of the invention, the polypeptide of the invention or the polypeptide used in the method of the invention, the nucleic acid construct of the invention, the organisms, the host cell, the microorganisms, the plant, plant tissue, plant cell, or the part thereof of the invention, the vector of the invention, antagonist or the agonist identified with the method of the invention, the antibody of the present invention, the antisense molecule of the present invention or the nucleic acid molecule identified with the method of the present invention, can be used for the identification and production of compounds capable of conferring a modulation of nitrogen or nitrogen containing compounds levels in an organism or parts thereof, preferably to identify and produce compounds conferring an increase of nitrogen or nitrogen containing compounds levels in an organism or parts thereof, if said identified compound is applied to the organism or part thereof, i.e. as part of its food, or in the growing or culture media.

[0585] These and other embodiments are disclosed and encompassed by the description and examples of the present invention. Further literature concerning any one of the methods, uses and compounds to be employed in accordance with the present invention may be retrieved from public libraries, using for example electronic devices. For example the public database “Medline” may be utilized which is available on the Internet, for example under hftp://www.ncbi.nlm.nih.gov/PubMed/medline.html. Further databases and addresses, such as hftp://www.ncbi.nlm.nih.gov/, hftp://www.infobiogen.fr/, hftp://www.fmi.ch/biology/research-tools.html, hftp://www.tigr.org/, are known to the person skilled in the art and can also be obtained using, e.g., hftp://www.lycos.com. An overview of patent information in biotechnology and a survey of relevant sources of patent information useful for retrospective searching and for current awareness is given in Berks, TIBTECH 12 (1994), 352-364.

[0586] The present invention is illustrated by the examples, which follow. The present examples illustrate the basic invention without being intended as limiting the subject of the invention. The content of all of the references, patent applications, patents and published patent applications cited in the present patent application is herewith incorporated by reference.

### EXAMPLE 1

### Cloning SEQ ID NO: 689 from Saccharomyces cerevisiae for the expression in plants

[0587] Unless otherwise specified, standard methods as described in Sambrook et al., Molecular Cloning: A laboratory manual, Cold Spring Harbor 1989, Cold Spring Harbor Laboratory Press are used.

[0588] SEQ ID NO: 689 is amplified by PCR as described in the protocol of the Pfu Turbo or DNA Herculase polymerase (Stratagene).

[0589] The composition for the protocol of the Pfu Turbo DNA polymerase was as follows: 1×PCR buffer (Stratagene), 0.2 mM of each dNTP, 100 ng genomic DNA of Saccharomyces cerevisiae (strain S288C; Research Genetics, Inc., now Invitrogen), 50 pmol forward primer, 50 pmol reverse primer, 2.5 u Pfu Turbo DNA polymerase. The amplification cycles were as follows:

[0590] 1 cycle of 3 minutes at 94-95° C., followed by 25-36 cycles of in each case 1 minute at 95° C. or 30 seconds at 94° C., 45 seconds at 50° C., 30 seconds at 50° C. or 30 seconds at 55° C. and 210-480 seconds at 72° C., followed by 1 cycle of 8 minutes at 72° C., then 4° C. The composition for the protocol of the Herculase polymerase was as follows: 1×PCR buffer (Stratagene), 0.2 mM of each dNTP, 100 ng genomic DNA of Saccharomyces cerevisiae (strain S288C; Research Genetics, Inc., now Invitrogen), 50 pmol forward primer, 50 pmol reverse primer, 2.5 u Herculase polymerase. The amplification cycles were as follows:

[0591] 1 cycle of 2-3 minutes at 94° C., followed by 25-30 cycles of in each case 30 seconds at 94° C., 30 seconds at 55-60° C. and 5-10 minutes at 72° C., followed by 1 cycle of 10 minutes at 72° C., then 4° C.

[0592] The following primer sequences were selected for the gene SEQ ID NO: 689

| | |
|---|---|
| i) forward primer | (SEQ ID NO: 949) |
| atggctcggg gtgacggaca t | |
| ii) reverse primer | (SEQ ID NO: 950) |
| tcatgcttct tttgcgtgat gcaat | |

[0593] Thereafter, the amplificate was purified over QIAquick columns following the standard protocol (Qiagen).

[0594] For the cloning of PCR-products, produced by Pfu Turbo DNA polymerase, the vector DNA (30 ng) was restricted with SmaI following the standard protocol (MBI Fermentas) and stopped by addition of high-salt buffer. The restricted vector fragments were purified via Nucleobond columns using the standard protocol (Macherey-Nagel). Thereafter, the linearized vector was dephosphorylated following the standard protocol (MBI Fermentas).

[0595] The PCR-products, produced by Pfu Turbo DNA polymerase, were phosphorylated using a T4 DNA polymerase using a standard protocol (e.g. MBI Fermentas) and cloned into the processed binary vector.

[0596] The DNA termini of the PCR-products, produced by Herculase DNA polymerase, were blunted in a second synthesis reaction using Pfu Turbo DNA polymerase. The composition for the protocol of the blunting the DNA-termini was as follows: 0.2 mM blunting dTTP and 1.25 u Pfu Turbo DNA polymerase. The reaction was incubated at 72° C. for 30 minutes. Then the PCR-products were phosphorylated using a T4 DNA polymerase using a standard protocol (e.g. MBI Fermentas) and cloned into the processed vector as well.

[0597] A binary vector comprising a selection cassette (promoter, selection marker, terminator) and an expression cassette with promoter, cloning cassette and terminator sequence between the T-DNA border sequences was used. In addition to those within the cloning cassette, the binary vector has no SmaI cleavage site. Binary vectors which can be used are known to the skilled worker; an overview of binary vectors and their use can be found in Hellens, R., Mullineaux, P. and Klee H., [(2000) “A guide to Agrobacterium binary vectors”, Trends in Plant Science, Vol. 5 No. 10, 446-451. Depending on the vector used, cloning may advantageously also be carried out via other restriction enzymes. Suitable advantageous cleavage sites can be added to the ORF by using suitable primers for the PCR amplification.

[0598] Approximately 30 ng of prepared vector and a defined amount of prepared amplificate were mixed and ligated by addition of ligase.

[0599] The ligated vectors were transformed in the same reaction vessel by addition of competent E. coli cells (strain DH5alpha) and incubation for 20 minutes at 1° C. followed by a heat shock for 90 seconds at 42° C. and cooling to 4° C. Then, complete medium (SOC) was added and the mixture was incubated for 45 minutes at 37° C. The entire mixture was subsequently plated onto an agar plate with antibiotics (selected as a function of the binary vector used) and incubated overnight at 37° C.

[0600] The outcome of the cloning step was verified by amplification with the aid of primers which bind upstream and downstream of the integration site, thus allowing the amplification of the insertion. In addition combinations of the above mentioned gene specific primers and upstream and downstream primers were used in PCR reactions to identify clones with the correct insert orientation. The amplifications were carried as described in the protocol of Taq DNA polymerase (Gibco-BRL).

[0601] The amplification cycles were as follows: 1 cycle of 5 minutes at 94° C., followed by 35 cycles of in each case 15 seconds at 94° C., 15 seconds at 50-66° C. and 5 minutes at 72° C., followed by 1 cycle of 10 minutes at 72° C., then 4° C.

[0602] Several colonies were checked, but only one colony for which a PCR product of the expected size was detected was used in the following steps.

[0603] A portion of this positive colony was transferred into a reaction vessel filled with complete medium (LB) and incubated overnight at 37° C. The LB medium contained an antibiotic chosen to suit the binary vector (see above) used and the resistance gene present therein in order to select the clone.

[0604] The plasmid preparation was carried out as specified in the Qiaprep standard protocol (Qiagen).

### EXAMPLE 2

### Generation of Transgenic Plants which Express SEQ ID NO: 689

[0605] 1 ng of the plasmid DNA isolated was transformed by electroporation into competent cells of Agrobacterium tumefaciens, of strain GV 3101 pMP90 (Koncz and Schell, Mol. Gen. Gent. 204, 383-396,1986). The choice of the agrobacterial strain depends on the choice of the binary vector. An overview of possible strains and their properties is found in Hellens, R., Mullineaux, P. and Klee H., (2000) “A guide to Agrobacterium binary vectors, Trends in Plant Science, Vol. 5 No. 10, 446-451. Thereafter, complete medium (YEP) was added and the mixture was transferred into a fresh reaction vessel for 3 hours at 28° C. Thereafter, all of the reaction mixture was plated onto YEP agar plates supplemented with the respective antibiotics, for example rifampicin and gentamycin for GV3101 pMP90, and a further antibiotic for the selection onto the binary vector, was plated, and incubated for 48 hours at 28° C.

[0606] The agrobacteria generated in Example 2, which contains the plasmid construct were then used for the transformation of plants.

[0607] A colony was picked from the agar plate with the aid of a pipette tip and taken up in 3 ml of liquid TB medium, which also contained suitable antibiotics, depending on the agrobacterial strain and the binary plasmid. The preculture was grown for 48 hours at 28° C. and 120 rpm.

[0608] 400 ml of LB medium containing the same antibiotics as above were used for the main culture. The preculture was transferred into the main culture. It was grown for 18 hours at 28° C. and 120 rpm. After centrifugation at 4 000 rpm, the pellet was resuspended in infiltration medium (MS medium, 10% sucrose).

[0609] In order to grow the plants for the transformation, dishes (Piki Saat 80, green, provided with a screen bottom, 30×20×4.5 cm, from Wiesauplast, Kunststofttechnik, Germany) were half-filled with a GS 90 substrate (standard soil, Werkverband E.V., Germany). The dishes were watered overnight with 0.05% Proplant solution (Chimac-Apriphar, Belgium). Arabidopsis thaliana C24 seeds (Nottingham Arabidopsis Stock Centre, UK; NASC Stock N906) were scattered over the dish, approximately 1 000 seeds per dish. The dishes were covered with a hood and placed in the stratification facility (8 h, 110 μmol/m2/s-1, 22° C.; 16 h, dark, 6° C.). After 5 days, the dishes were placed into the short-day controlled environment chamber (8 h 130 μmol/m2/s-1, 22° C.; 16 h, dark 20° C.), where they remained for approximately 10 days until the first true leaves had formed.

[0610] The seedlings were transferred into pots containing the same substrate (Teku pots, 7 cm, LC series, manufactured by Pöppelmann GmbH & Co, Germany). Five plants were pricked out into each pot. The pots were then returned into the short-day controlled environment chamber for the plant to continue growing.

[0611] After 10 days, the plants were transferred into the greenhouse cabinet (supplementary illumination, 16 h, 340 μE, 22° C.; 8 h, dark, 20° C.), where they were allowed to grow for further 17 days.

[0612] For the transformation, 6-week-old Arabidopsis plants which had just started flowering were immersed for 10 seconds into the above-described agrobacterial suspension which had previously been treated with 10 μl Silwett L77 (Crompton S. A., Osi Specialties, Switzerland). The method in question is described in Clough and Bent, 1998 (Clough, J C and Bent, A F. 1998 Floral dip: a simplified method for Agrobacterium-mediated transformation of Arabidopsis thaliana, Plant J. 16:735-743.

[0613] The plants were subsequently placed for 18 hours into a humid chamber. Thereafter, the pots were returned to the greenhouse for the plants to continue growing. The plants remained in the greenhouse for another 10 weeks until the seeds were ready for harvesting.

[0614] Depending on the resistance marker used for the selection of the transformed plants the harvested seeds were planted in the greenhouse and subjected to a spray selection or else first sterilized and then grown on agar plates supplemented with the respective selection agent. In case of BASTA®-resistance, plantlets were sprayed four times at an interval of 2 to 3 days with 0.02% BASTA® and transformed plants were allowed to set seeds. The seeds of the transgenic A. thaliana plants were stored in the freezer (at −20° C.).

### EXAMPLE 3

### Nitrogen Content Analysis

[0615] The determination of nitrogen in the samples is performed using the Dumas method which relies on the complete combustion of the test material. The sample is heated in a high temperature furnace and rapidly combusted in the presence of pure oxygen. The combustion products (mainly CO2, H2O, NOx, and N2) are collected and allowed to equilibrate. An aliquot of the gas mixture is passed over hot copper to remove any oxygen and convert NO2 to N2. The sample is then passed through a trap that removes CO2 and H2O. The remaining nitrogen is measured by a thermal conductivity detector.

[0616] For the analysis of leaf material or for seed kernels, homogenized freeze-dryed material is used. In the case of Arabidopsis seeds, the seeds are analyzed directly without pretreatment.

[0617] 4-7 mg of the sample were weighed into a tin foil cup together with 15 mg of tungsten(VI)-oxide (WO3). Analysis was performed using a commercial elementar analyzer (e.g. ELEMENTAR vario EL III, ELEMENTAR, Hanau, Germany).

[0618] Table VI shows the increased total nitrogen content of seeds of transgenic plants transformed with the yeast ORF YPR138c, corresponding to SeqID NO: 689 under control of the double 35S promotor. Column 1 shows the measured elements, column 2 shows the wild type variability as relative standard deviation, column 3 shows the mean change in the element content for different transgenic lines transformed with SEQ ID NO: 689 relative to the wildtype control which is standardized as “1”, column 4 shows the standard deviation for the different transgenic lines and column 5 shows the maximal observed change. As expected, the relative increase in nitrogen corresponds to a relative decrease in carbon content.

| | WT variability | | | |
|---|---|---|---|---|
| Parameter | (RSD; %) | Mean | SD | Max. Change |
| % N | 0.05 | 1.17 | 0.06 | 1.24 |
| % C | 0.01 | 0.90 | 0.03 | 0.87 |

### EXAMPLE 4

### Enhanced Nitrogen Use Efficiency

### Plant Screening (Arabidopsis) for Growth Under Limited Nitrogen Supply

[0619] For screening of transgenic plants a specific culture facility was used. For high-throughput purposes plants were screened for biomass production on agar plates with limited supply of nitrogen (adapted from Estelle and Somerville, 1987). The screening pipeline consists of three level. Transgenic lines are subjected to subsequent level if biomass production was significantly improved in comparison to wild type plants. With each level number of replicates and statistical stringency was increased.

[0620] For the sowing, the seeds, which had been stored in the refrigerator (at −20° C.), were removed from the Eppendorf tubes with the aid of a toothpick and transferred onto plates. In total, approximately 15-30 seeds were distributed horizontally on each plate (12×12 cm).

[0621] After the seeds had been sown, plates are subjected to stratification for 2-4 days in the dark at 4° C. After the stratification, the test plants were grown for 22 to 25 days at a 16-h-light, 8-h-dark rhythm at 20° C., an atmospheric humidity of 60% and a CO2 concentration of approximately 400 ppm. The light sources used generate a light resembling the solar color spectrum with a light intensity of approximately 100 μE/m2/s-1.

[0622] Improved growth under nitrogen limited conditions was assessed by biomass production of shoots and roots of transgenic plants in comparison to wild type control plants after 20-25 days growth.

[0623] Transgenic lines expressing the yeast ORF YPR138c, corresponding to SEQ ID NO: 689 under control of a strong constitutive promotor like the double 35S promotor, showed enhanced biomass production of shoots and roots under nitrogen limited conditions in comparison to wilde type control plants.

### EXAMPLE 5

### Engineering Ryegrass Plants by Over-Expressing the Polynucleotide Characterized in the Invention, e.g. Derived from Saccharomyces, E. coli or an Other Organism

[0624] Seeds of several different ryegrass varieties can be used as explant sources for transformation, including the commercial variety Gunne available from Svalof Weibull seed company or the variety Affinity. Seeds are surface-sterilized sequentially with 1% Tween-20 for 1 minute, 100% bleach for 60 minutes, 3 rinses with 5 minutes each with de-ionized and distilled H2O, and then germinated for 3-4 days on moist, sterile filter paper in the dark. Seedlings are further sterilized for 1 minute with 1% Tween-20, 5 minutes with 75% bleach, and rinsed 3 times with ddH2O, 5 min each.

[0625] Surface-sterilized seeds are placed on the callus induction medium containing Murashige and Skoog basal salts and vitamins, 20 g/l sucrose, 150 mg/l asparagine, 500 mg/l casein hydrolysate, 3 g/l Phytagel, 10 mg/l BAP, and 5 mg/l dicamba. Plates are incubated in the dark at 25° C. for 4 weeks for seed germination and embryogenic callus induction.

[0626] After 4 weeks on the callus induction medium, the shoots and roots of the seedlings are trimmed away, the callus is transferred to fresh media, is maintained in culture for another 4 weeks, and is then transferred to MSO medium in light for 2 weeks. Several pieces of callus (11-17 weeks old) are either strained through a 10 mesh sieve and put onto callus induction medium, or are cultured in 100 ml of liquid ryegrass callus induction media (same medium as for callus induction with agar) in a 250 ml flask. The flask is wrapped in foil and shaken at 175 rpm in the dark at 23° C. for 1 week. Sieving the liquid culture with a 40-mesh sieve is collected the cells. The fraction collected on the sieve is plated and is cultured on solid ryegrass callus induction medium for 1 week in the dark at 25° C. The callus is then transferred to and is cultured on MS medium containing 1% sucrose for 2 weeks.

[0627] Transformation can be accomplished with either Agrobacterium or with particle bombardment methods. An expression vector is created containing a constitutive plant promoter and the cDNA of the gene in a pUC vector. The plasmid DNA is prepared from E. coli cells using with Qiagen kit according to manufacturer's instruction. Approximately 2 g of embryogenic callus is spread in the center of a sterile filter paper in a Petri dish. An aliquot of liquid MSO with 10 g/l sucrose is added to the filter paper. Gold particles (1.0 μm in size) are coated with plasmid DNA according to method of Sanford et al., 1993 and are delivered to the embryogenic callus with the following parameters: 500 μg particles and 2 μg DNA per shot, 1300 psi and a target distance of 8.5 cm from stopping plate to plate of callus and 1 shot per plate of callus.

[0628] After the bombardment, calli are transferred back to the fresh callus development medium and maintained in the dark at room temperature for a 1-week period. The callus is then transferred to growth conditions in the light at 25° C. to initiate embryo differentiation with the appropriate selection agent, e.g. 250 nM Arsenal, 5 mg/l PPT or 50 mg/L Kanamycin. Shoots resistant to the selection agent are appearing and once rooted are transferred to soil.

[0629] Samples of the primary transgenic plants (T0) are analyzed by PCR to confirm the presence of T-DNA. These results are confirmed by Southern hybridization in which DNA is electrophoresed on a 1% agarose gel and transferred to a positively charged nylon membrane (Roche Diagnostics). The PCR DIG Probe Synthesis Kit (Roche Diagnostics) is used to prepare a digoxigenin-labelled probe by PCR, and used as recommended by the manufacturer.

[0630] Transgenic T0 ryegrass plants are propagated vegetatively by excising tillers. The transplanted tillers are maintained in the greenhouse for 2 months until well established. The shoots are defoliated and allowed to grow for 2 weeks.

[0631] Seeds of transgenic ryegrass can be analyzed for increased nitrogen content with the elementar analyzer as described under example 3.

### EXAMPLE 6

### Engineering Soybean Plants by Over-Expressing the Polynucleotide Characterized in the Invention, e.g. Derived from Saccharomyces, E. coli or Another Organism

[0632] Soybean can be transformed according to the following modification of the method described in the Texas A&M patent U.S. Pat. No. 5,164,310. Several commercial soybean varieties are amenable to transformation by this method. The cultivar Jack (available from the Illinois Seed Foundation) is commonly used for transformation. Seeds are sterilized by immersion in 70% (v/v) ethanol for 6 min and in 25% commercial bleach (NaOCl) supplemented with 0.1% (v/v) Tween for 20 min, followed by rinsing 4 times with sterile double distilled water. Removing the radicle, hypocotyl and one cotyledon from each seedling propagates seven-day seedlings. Then, the epicotyl with one cotyledon is transferred to fresh germination media in petri dishes and incubated at 25° C. under a 16-hr photoperiod (approx. 100 μE-m-2s-1) for three weeks. Axillary nodes (approx. 4 mm in length) are cut from 3-4 week-old plants. Axillary nodes are excised and incubated in Agrobacterium LBA4404 culture.

[0633] Many different binary vector systems have been described for plant transformation (e.g. An, G. in Agrobacterium Protocols. Methods in Molecular Biology vol 44, pp 47-62, Gartland K M A and M R Davey eds. Humana Press, Totowa, N.J.). Many are based on the vector pBIN19 described by Bevan (Nucleic Acid Research. 1984. 12:8711-8721) that includes a plant gene expression cassette flanked by the left and right border sequences from the Ti plasmid of Agrobacterium tumefaciens. A plant gene expression cassette consists of at least two genes—a selection marker gene and a plant promoter regulating the transcription of the cDNA or genomic DNA of the trait gene. Various selection marker genes can be used as described above, including the Arabidopsis gene encoding a mutated acetohydroxy acid synthase (AHAS) enzyme (U.S. Pat. Nos. 57,673,666 and 6,225,105). Similarly, various promoters can be used to regulate the trait gene to provide constitutive, developmental, tissue or environmental regulation of gene transcription as described above. In this example, the 34S promoter (GenBank Accession numbers M59930 and X16673) is used to provide constitutive expression of the trait gene.

[0634] After the co-cultivation treatment, the explants are washed and transferred to selection media supplemented with 500 mg/L timentin. Shoots are excised and placed on a shoot elongation medium. Shoots longer than 1 cm are placed on rooting medium for two to four weeks prior to transplanting to soil.

[0635] The primary transgenic plants (T0) are analyzed by PCR to confirm the presence of T-DNA. These results are confirmed by Southern hybridization in which DNA is electrophoresed on a 1% agarose gel and transferred to a positively charged nylon membrane (Roche Diagnostics). The PCR DIG Probe Synthesis Kit (Roche Diagnostics) is used to prepare a digoxigenin-labelled probe by PCR, and is used as recommended by the manufacturer.

[0636] Seeds of transgenic soybean can be analyzed for increased nitrogen content with the elementar analyzer as described under example 3.

### EXAMPLE 7

### Engineering Corn Plants by Over-Expressing the Polynucleotide Characterized in the Invention, e.g. Derived from Saccharomyces, E. coli or Another Organism

[0637] Transformation of maize (Zea mays L.) can be performed with a modification of the method described by Ishida et al. (1996. Nature Biotech 14745-50). Transformation is genotype-dependent in corn and only specific genotypes are amenable to transformation and regeneration. The inbred line A188 (University of Minnesota) or hybrids with A188 as a parent are good sources of donor material for transformation (Fromm et al. 1990 Biotech 8:833-839), but other genotypes can be used successfully as well. Ears are harvested from corn plants at approximately 11 days after pollination (DAP) when the length of immature embryos is about 1 to 1.2 mm. Immature embryos are co-cultivated with Agrobacterium tumefaciens that carry “super binary” vectors and transgenic plants are recovered through organogenesis. The super binary vector system of Japan Tobacco is described in WO patents WO94/00977 and WO95/06722. Vectors can be constructed as described. Various selection marker genes can be used including the maize gene encoding a mutated acetohydroxy acid synthase (AHAS) enzyme (U.S. Pat. No. 6,025,541). Similarly, various promoters can be used to regulate the trait gene to provide constitutive, developmental, tissue or environmental regulation of gene transcription. In this example, the 34S promoter (GenBank Accession numbers M59930 and X16673 can be used to provide constitutive expression of the trait gene.

[0638] Excised embryos can be grown on callus induction medium, then maize regeneration medium, containing imidazolinone as a selection agent. The Petri plates can be incubated in the light at 25° C. for 2-3 weeks, or until shoots develop. The green shoots can be transferred from each embryo to maize rooting medium and incubated at 25° C. for 2-3 weeks, until roots develop. The rooted shoots can be transplanted to soil in the greenhouse. T1 seeds can be produced from plants that exhibit tolerance to the imidazolinone herbicides and which can be PCR positive for the transgenes.

[0639] The T1 generation of single locus insertions of the T-DNA can segregate for the transgene in a 3:1 ratio. Those progeny containing one or two copies of the transgene can be tolerant of the imidazolinone herbicide. Seeds of transgenic corn can be analyzed for increased nitrogen content with the elementar analyzer as described under example 3.

### EXAMPLE 8

### Engineering Wheat Plants by Over-Expressing the Polynucleotide Characterized in the Invention, e.g. Derived from Saccharomyces, E. coli or Another Organism

[0640] Transformation of wheat can be performed with the method described by Ishida et al. (1996 Nature Biotech. 14745-50). The cultivar Bobwhite (available from CYMMIT, Mexico) can commonly be used in transformation. Immature embryos can be co-cultivated with Agrobacterium tumefaciens that carry “super binary” vectors, and transgenic plants are recovered through organogenesis. The super binary vector system of Japan Tobacco is described in WO patents WO94/00977 and WO95/06722. Vectors can be constructed as described. Various selection marker genes can be used including the maize gene encoding a mutated acetohydroxy acid synthase (AHAS) enzyme (U.S. Pat. No. 6,025,541). Similarly, various promoters can be used to regulate the trait gene to provide constitutive, developmental, tissue or environmental regulation of gene transcription. The 34S promoter (GenBank Accession numbers M59930 and X16673) can be used to provide constitutive expression of the trait gene.

[0641] After incubation with Agrobacterium, the embryos can be grown on callus induction medium, then regeneration medium, containing imidazolinone as a selection agent. The Petri plates can be incubated in the light at 25° C. for 2-3 weeks, or until shoots develop. The green shoots can be transferred from each embryo to rooting medium and incubated at 25° C. for 2-3 weeks, until roots develop. The rooted shoots can be transplanted to soil in the greenhouse. T1 seeds can be produced from plants that exhibit tolerance to the imidazolinone herbicides and which are PCR positive for the transgenes.

[0642] The T1 generation of single locus insertions of the T-DNA can segregate for the transgene in a 3:1 ratio. Those progeny containing one or two copies of the transgene can be tolerant of the imidazolinone herbicide. Homozygous T2 plants exhibited similar phenotypes. Seeds of transgenic wheat can be analyzed for increased nitrogen content with the elementar analyzer as described under example 3.

### EXAMPLE 9

### Engineering Rapeseed/Canola Plants by Over-Expressing the Polynucleotide Characterized in the Invention, e.g. Derived from Saccharomyces cerevisiae, E. coli or Another Organism

[0643] Cotyledonary petioles and hypocotyls of 5-6 day-old young seedlings can be used as explants for tissue culture and transformed according to Babic et al. (1998, Plant Cell Rep 17: 183-188). The commercial cultivar Westar (Agriculture Canada) can be the standard variety used for transformation, but other varieties can be used.

[0644] Agrobacterium tumefaciens LBA4404 containing a binary vector can be used for canola transformation. Many different binary vector systems have been described for plant transformation (e.g. An, G. in Agrobacterium Protocols. Methods in Molecular Biology vol 44, pp 47-62, Gartland K M A and M R Davey eds. Humana Press, Totowa, N.J.). Many are based on the vector pBIN19 described by Bevan (Nucleic Acid Research. 1984. 12:8711-8721) that includes a plant gene expression cassette flanked by the left and right border sequences from the Ti plasmid of Agrobacterium tumefaciens. A plant gene expression cassette can consist of at least two genes—a selection marker gene and a plant promoter regulating the transcription of the cDNA or genomic DNA of the trait gene. Various selection marker genes can be used including the Arabidopsis gene encoding a mutated acetohydroxy acid synthase (AHAS) enzyme (U.S. Pat. Nos. 57,673,666 and 6,225,105). Similarly, various promoters can be used to regulate the trait gene to provide constitutive, developmental, tissue or environmental regulation of gene transcription. The 34S promoter (GenBank Accession numbers M59930 and X16673) can be used to provide constitutive expression of the trait gene.

[0645] Canola seeds can be surface-sterilized in 70% ethanol for 2 min., and then in 30% Clorox with a drop of Tween-20 for 10 min, followed by three rinses with sterilized distilled water. Seeds can be then germinated in vitro 5 days on half strength MS medium without hormones, 1% sucrose, 0.7% Phytagar at 23° C., 16 hr. light. The cotyledon petiole explants with the cotyledon attached can be excised from the in vitro seedlings, and can be inoculated with Agrobacterium by dipping the cut end of the petiole explant into the bacterial suspension. The explants can be then cultured for 2 days on MSBAP-3 medium containing 3 mg/l BAP, 3% sucrose, 0.7% Phytagar at 23° C., 16 hr light. After two days of co-cultivation with Agrobacterium, the petiole explants can be transferred to MSBAP-3 medium containing 3 mg/l BAP, cefotaxime, carbenicillin, or timentin (300 mg/l) for 7 days, and can then be cultured on MSBAP-3 medium with cefotaxime, carbenicillin, or timentin and selection agent until shoot regeneration. When the shoots are 5-10 mm in length, they can be cut and transferred to shoot elongation medium (MSBAP-0.5, containing 0.5 mg/l BAP). Shoots of about 2 cm in length can be transferred to the rooting medium (MSO) for root induction.

[0646] Samples of the primary transgenic plants (T0) can be analyzed by PCR to confirm the presence of T-DNA. These results can be confirmed by Southern hybridization in which DNA is electrophoresed on a 1% agarose gel and are transferred to a positively charged nylon membrane (Roche Diagnostics). The PCR DIG Probe Synthesis Kit (Roche Diagnostics) can be used to prepare a digoxigenin-labelled probe by PCR, and used as recommended by the manufacturer.

[0647] Seeds of transgenic canola can be analyzed for increased nitrogen content with the elementar analyzer as described under example 3.

### EXAMPLE 10

### Engineering Alfalfa Plants by Over-Expressing the Polynucleotide Characterized in the Invention, e.g. Derived from Saccharomyces, E. coli or Another Organism

[0648] A regenerating clone of alfalfa (Medicago sativa) can be transformed using the method of (McKersie et al., 1999 Plant Physiol 119: 839-847). Regeneration and transformation of alfalfa can be genotype dependent and therefore a regenerating plant is required. Methods to obtain regenerating plants have been described. For example, these can be selected from the cultivar Rangelander (Agriculture Canada) or any other commercial alfalfa variety as described by Brown DCW and A Atanassov (1985. Plant Cell Tissue Organ Culture 4: 111-112). Alternatively, the RA3 variety (University of Wisconsin) can be selected for use in tissue culture (Walker et al., 1978 Am J Bot 65:654-659).

[0649] Petiole explants can be cocultivated with an overnight culture of Agrobacterium tumefaciens C58C1 pMP90 (McKersie et al., 1999 Plant Physiol 119: 839-847) or LBA4404 containing a binary vector. Many different binary vector systems have been described for plant transformation (e.g. An, G. in Agrobacterium Protocols. Methods in Molecular Biology vol 44, pp 47-62, Gartland K M A and M R Davey eds. Humana Press, Totowa, N.J.). Many are based on the vector pBIN19 described by Bevan (Nucleic Acid Research. 1984. 12:8711-8721) that includes a plant gene expression cassette flanked by the left and right border sequences from the Ti plasmid of Agrobacterium tumefaciens. A plant gene expression cassette can consist of at least two genes—a selection marker gene and a plant promoter regulating the transcription of the cDNA or genomic DNA of the trait gene. Various selection marker genes can be used including the Arabidopsis gene encoding a mutated acetohydroxy acid synthase (AHAS) enzyme (U.S. Pat. Nos. 57,673,666 and 6,225,105). Similarly, various promoters can be used to regulate the trait gene that provides constitutive, developmental, tissue or environmental regulation of gene transcription. The 34S promoter (GenBank Accession numbers M59930 and X16673) can be used to provide constitutive expression of the trait gene.

[0650] The explants can be cocultivated for 3 d in the dark on SH induction medium containing 288 mg/L Pro, 53 mg/L thioproline, 4.35 g/L K2SO4, and 100 μm acetosyringinone. The explants can be washed in half-strength Murashige-Skoog medium (Murashige and Skoog, 1962) and plated on the same SH induction medium without acetosyringinone but with a suitable selection agent and suitable antibiotic to inhibit Agrobacterium growth. After several weeks, somatic embryos can be transferred to BOi2Y development medium containing no growth regulators, no antibiotics, and 50 g/L sucrose. Somatic embryos are subsequently germinated on half-strength Murashige-Skoog medium. Rooted seedlings can be transplanted into pots and grown in a greenhouse.

[0651] The T0 transgenic plants are propagated by node cuttings and rooted in Turface growth medium. The plants are defoliated and grown to a height of about 10 cm (approximately 2 weeks after defoliation).

[0652] Seeds of transgenic alfalfa can be analyzed for increased nitrogen content with the elementar analyzer as described under example 3.

### EXAMPLE 11

[0653] Preparation of homologous sequences from plants Different plants can be grown under standard or varying conditions in the greenhouse. RNA can be extracted following the protocol of Jones, Dunsmuir and Bedbrook (1985) EMBO J. 4: 2411-2418. Approx. 1 gram of tissue material from various organs is ground in liquid nitrogen. The powder is transferred to a 13 ml Falcon tube containing 4.5 ml NTES buffer (100 mM NaCl, 10 mM Tris/HCl pH 7.5, 1 mM EDTA, 1% SDS; in RNase-free water) and 3 ml phenol/chloroform/isoamylalcohol (25/24/1), immediately mixed and stored on ice. The mixture is spun for 10 minutes at 7000 rpm using a centrifuge (Sorval; SM24 or SS34 rotor). The supernatant is transferred to a new tube, 1/10 volume of 3 M NaAcetate (pH 5.2; in RNase-free water) and 1 volume of isopropanol is added, mixed at stored for 1 hour or overnight at −20° C. The mixture is spun for 10 minutes at 7000 rpm. The supernatant is discarded and the pellet washed with 70% ethanol (v/v). The mixture is spun for 5 minutes at 7000 rpm, the supernatant is discarded and the pellet is air-dried. 1 ml RNase-free water is added and allow the DNA/RNA pellet to dissolve on ice at 4 C. The nucleic acid solution is transferred to a 2 ml Eppendorf tube and 1 ml of 4 M LiAcetate is added. After mixing the solution is kept for at least 3 hours, or overnight, at 4 C. The mixture is spun for 10 minutes at 14000 rpm, the supernatant discarded, the pellet washed with 70% Ethanol, air-dried and dissolved in 200 μl of RNase-free water.

[0654] Total RNA can be used to construct a cDNA-library according to the manufacturer's protocol (for example using the ZAP-cDNA synthesis and cloning kit of Stratagene, La Jolla, USA). Basically, messenger RNA (mRNA) is primed in the first strand synthesis with a oligo(dT) linker-primer and is reverse-transcribed using reverse transcriptase. After second strand cDNA synthesis, the double-stranded cDNA is ligated into the Uni-ZAP XR vector. The Uni-ZAP XR vector allows in vivo excision of the pBluescript phagemid. The polylinker of the pBluescript phagemid has 21 unique cloning sites flanked by T3 and T7 promoters and a choice of 6 different primer sites for DNA sequencing. Systematic single run sequencing of the expected 5 prime end of the clones can allow preliminary annotation of the sequences for example with the help of the pedant pro Software package (Biomax, München). Clones for the nucleic acids of the invention or used in the process according to the invention can be identified based on homology search with standard algorithms like blastp or gap. Identified putative full length clones with identity or high homology can be subjected to further sequencing in order to obtain the complete sequence.

[0655] Additional new homologous sequences can be identified in a similar manner by preparing respective cDNA libraries from various plant sources as described above. Libraries can then be screened with available sequences of the invention under low stringency conditions for example as described in Sambrook et al., Molecular Cloning: A laboratory manual, Cold Spring Harbor 1989, Cold Spring Harbor Laboratory Press. Purified positive clones can be subjected to the in vivo excision and complete sequencing. A pairwise sequence alignment of the original and the new sequence using the blastp or gap program allows the identification of orthologs, meaning homologous sequences from different organisms, which should have a sequence identity of at least 30%. Furthermore the conservation of functionally important amino acid residues or domains, which can be identified by the alignment of several already available paralogs, can identify a new sequence as an new orthologs.

[0656] Alternatively libraries can be subjected to mass sequencing and obtained sequences can be stored in a sequence database, which then can be screened for putative orthologs by different search algorithms, for example the tbastn algorithm to search the obtained nucleic acid sequences with a amino acid sequence of the invention. Clones with the highest sequence identity are used for a complete sequence determination and orthologs can be identified as described above.

[0657] The oxidative pentose phosphate pathway is known as a major source of reducing power for biosynthetic processes such as fatty-acid synthesis and the assimilation of nitrogen (Neuhaus and Emes, Annu Rev Plant Physiol Plant Mol Biol 200, 51:111-140). In addition it provides metabolic intermediates for biosynthetic processes. Enzymes for this pathway are found both in the cytosol and in the plastids, whereby the precise distribution of the activities varies among plant species and growth conditions. One of the important enzymes of the oxidative pentose phosphate pathway is the glucose-6-phosophate dehydrogenase, with different genes encoding discrete cytosolic and plastidic isoenzymes. Two classes of plastidic G6PDH have been distinguished in higher plants. Although both plastidic activities are inhibited by increased NADPH/NADP+ and inactivated by dithiothreitol, one of the enzymes is striking less sensitive to both forms of modulation. The involvement of the less sensitive isoenzyme of G6PDH in the provision of the NADPH for ferredoxin-dependent reactions is suggested by an increase in the expression of genes encoding these isoforms in Arabidopsis after transfer from a medium containing ammonium to one including nitrate (Wang et al., Plant Cell 2000, 12:1491-15009) Additionally recent studies on barley roots have identified a similar plastidic isoform in barley to be induced in response to exposure to ammonium or glutamate (Esposito et al., Physiol Plant 2001, 113:469-476).

[0658] Although the basic features of the oxidative pentose phosphate pathway are well established, details of how the pathway operates in plants and how it influences other processes (like nitrogen fixation) remain largely conjecture (reviewed in Kruger and von Schaewen, Current Opinion in Plant Biology, 2003, 6:236-264).

[0659] Farnesyl pyrophosphate synthetase (FPP synthase) is known as a cytosolic enzyme that has dimethyl-allyl-transtransferase and geranyl-transtransferase activities (Wang et al., Plant Journal, 43, 413-424, 2005; Barth et al., Physiologica Plantarium, 121, 282-293, 2004; Glichet et al., Curr. Opinion Plant Biol., 6, 530-535, 2003). FPP synthase catalyzes the sequential 1′-4 coupling of isopentenyl diphosphate (IPP) with dimethylallyl diphosphate and geranyl diphosphate, forming C15 farnesyl pyrophosphate units for isoprenoid and sterol biosynthesis. It is unclear how sterol biosynthesis or protein farnesylation might be involved in increasing the nitrogen content in a cell, preferably in plants or parts thereof, particularly by generating or increasing the FPP synthase activity in an organelle, preferably in plastids.

[0660] L-lactate cytochrome c oxidoreductase/cytochrome b2 is known as a component of the mitochondrial intermembrane space, required for lactate utilization. It is unclear how cytochrome b2 activity might be involved in increasing the nitrogen content in a cell, preferably in plants or parts thereof, particularly by generating or increasing the cytochrome bs2 activity in an organelle, preferably in plastids.

[0661] Accordingly, in one embodiment this is achieved by the accumulation or production of a nitrogen or nitrogen containing compounds. In one embodiment the term “nitrogen or nitrogen containing compounds” as used herein relates to protein, containing “amino acids”, or other nitrogen containing compounds like “heme-complex”, “purine” and/or “pyrimidine”-containing compounds and/or derivates. Further, in another embodiment the term “nitrogen or nitrogen containing compounds” as used herein also relates to compositions of fine chemicals comprising N-containing compounds.

[0662] Accordingly, the present invention relates to a process comprising
[0663] (a) increasing or generating the activity of one or more of the of a protein as shown in table II, application no. 2 and/or application no. 3, column 3 encoded by the nucleic acid sequences as shown in table I, application no. 2 and/or application no. 3, column 5, in an organelle of a microorganism or plant, or
[0664] (b) increasing or generating the activity of a protein as shown in table II, application no. 2 and/or application no. 3, column 3 encoded by the nucleic acid sequences as shown in table I, application no. 2 and/or application no. 3, column 5 in the plastid of a microorganism or plant, or in one or more parts thereof; and
[0665] (c) growing the organism under conditions which permit the accumulation and/or production of nitrogen or nitrogen containing compounds, thus, N-containing compound, in said organism or in the culture medium surrounding the organism.

[0666] Accordingly, the present invention relates to a process for the accumulation and/or production of nitrogen or nitrogen containing compounds respectively comprising
[0667] a) increasing or generating the activity of a protein selected from the group as shown in table II, application no. 2 and/or application no. 3, column 3 encoded by the nucleic acid sequences selected from the group as shown in table I, column 5, in an organelle of a non-human organism, or
[0668] b) increasing or generating the activity of a protein selected from the group as shown in table II, application no. 2 and/or application no. 3, column 3 encoded by the nucleic acid sequences selected from the group as shown in table I, application no. 2 and/or application no. 3, column 5, which are joined to a nucleic acid sequence encoding a transit peptide in a non-human organism, or in one or more parts thereof; or
[0669] c) increasing or generating the activity of a protein selected from the group as shown in table II, application no. 2 and/or application no. 3, column 3 encoded by the nucleic acid sequences selected from the group as shown in table I, application no. 2 and/or application no. 3, column 5, which are joined to a nucleic acid sequence encoding chloroplast localization sequence, in a non-human organism, or in one or more parts thereof, and
[0670] d) growing the organism under conditions which permit the accumuation of nitrogen and/or the production of N-containing compound in said organism.

[0671] Advantagously the activity of the protein selected from the group as shown in table II, application no. 2 and/or application no. 3, column 3 encoded by the nucleic acid sequences selected from the group as shown in table I, application no. 2 and/or application no. 3, column 5 is increased or generated in the above-mentioned process in the plastid of a plant.

[0672] In principle the nucleic acid sequence encoding a transit peptide can be isolated from every organism such as microorganisms such as algae or plants containing plastids preferably chloroplasts. A “transit peptide” is an amino acid sequence, whose encoding nucleic acid sequence is translated together with the corresponding structural gene. That means the transit peptide is an integral part of the translated protein and forms an amino terminal extension of the protein. Both are translated as so called “preprotein”. In general the transit peptide is cleaved off from the preprotein during or just after import of the protein into the correct cell organelle such as a plastid to yield the mature protein. The transit peptide ensures correct localization of the mature protein by facilitating the transport of proteins through intracellular membranes. Preferred nucleic acid sequences encoding a transit peptide are derived from a nucleic acid sequence encoding a protein finally resided in the plastid and stemming from an organism selected from the group consisting of the genera

[0673] Acetabularia, Arabidopsis, Brassica, Capsicum, Chlamydomonas, Cururbita, Dunaliella, Euglena, Flayeria, Glycine, Helianthus, Hordeum, Lemna, Lolium, Lycopersion, Malus, Medicago, Mesembryanthemum, Nicotiana, Oenotherea, Oryza, Petunia, Phaseolus, Physcomitrella, Pinus, Pisum, Raphanus, Silene, Sinapis, Solanum, Spinacea, Stevia, Synechococcus, Triticum and Zea.

[0674] Advantageously such transit peptides, which are beneficially used in the inventive process, are derived from the nucleic acid sequence encoding a protein selected from the group consisting of

[0675] ribulose bisphosphate carboxylase/oxygenase, 5-enolpyruvyl-shikimate-3-phosphate synthase, acetolactate synthase, chloroplast ribosomal protein CS17, Cs protein, ferredoxin, plastocyanin, ribulose bisphosphate carboxylase activase, tryptophan synthase, acyl carrier protein, plastid chaperonin-60, cytochrome c552, 22-kDA heat shock protein, 33-kDa Oxygen-evolving enhancer protein 1, ATP synthase y subunit, ATP synthase δ subunit, chlorophyll-a/b-binding proteinII-1, Oxygen-evolving enhancer protein 2, Oxygen-evolving enhancer protein 3, photosystem I: P21, photosystem I: P28, photosystem I: P30, photosystem I: P35, photosystem I: P37, glycerol-3-phosphate acyltransferases, chlorophyll a/b binding protein, CAB2 protein, hydroxymethyl-bilane synthase, pyruvate-orthophosphate dikinase, CAB3 protein, plastid ferritin, ferritin, early light-inducible protein, glutamate-1-semialdehyde aminotransferase, protochlorophyllide reductase, starch-granule-bound amylase synthase, light-harvesting chlorophyll a/b-binding protein of photosystem II, major pollen allergen Lol p 5a, plastid CIpB ATP-dependent protease, superoxide dismutase, ferredoxin NADP oxidoreductase, 28-kDa ribonucleoprotein, 31-kDa ribonucleoprotein, 33-kDa ribonucleoprotein, acetolactate synthase, ATP synthase CF0 subunit 1, ATP synthase CF0 subunit 2, ATP synthase CF0 subunit 3, ATP synthase CF0 subunit 4, cytochrome f, ADP-glucose pyrophosphorylase, glutamine synthase, glutamine synthase 2, carbonic anhydrase, GapA protein, heat-shock-protein hsp21, phosphate translocator, plastid ClpA ATP-dependent protease, plastid ribosomal protein CL24, plastid ribosomal protein CL9, plastid ribosomal protein PsCL18, plastid ribosomal protein PsCL25, DAHP synthase, starch phosphorylase, root acyl carrier protein II, betaine-aldehyde dehydrogenase, GapB protein, glutamine synthetase 2, phosphoribulokinase, nitrite reductase, ribosomal protein L12, ribosomal protein L13, ribosomal protein L21, ribosomal protein L35, ribosomal protein L40, triose phosphate-3-phosphoglyerate-phosphate translocator, ferredoxin-dependent glutamate synthase, glyceraldehyde-3-phosphate dehydrogenase, NADP-dependent malic enzyme and NADP-malate dehydrogenase.

[0676] More preferred the nucleic acid sequence encoding a transit peptide is derived from a nucleic acid sequence encoding a protein finally resided in the plastid and stemming from an organism selected from the group consisting of the species:

[0677] Acetabularia mediterranea, Arabidopsis thaliana, Brassica campestris, Brassica napus, Capsicum annuum, Chlamydomonas reinhardtii, Cururbita moschata, Dunaliella salina, Dunaliella tertiolecta, Euglena gracilis, Flayeria trinervia, Glycine max, Helianthus annuus, Hordeum vulgare, Lemna gibba, Lolium perenne, Lycopersion esculentum, Malus domestica, Medicago falcata, Medicago sativa, Mesembryanthemum crystallinum, Nicotiana plumbaginifolia, Nicotiana sylvestris, Nicotiana tabacum, Oenotherea hookeri, Oryza sativa, Petunia hybrida, Phaseolus vulgaris, Physcomitrella patens, Pinus tunbergii, Pisum sativum, Raphanus sativus, Silene pratensis, Sinapis alba, Solanum tuberosum, Spinacea oleracea, Stevia rebaudiana, Synechococcus, Synechocystis, Triticum aestivum and Zea mays.

[0678] Even more preferred nucleic acid sequences are encoding transit peptides as disclosed by von Heijne et al. [Plant Molecular Biology Reporter, Vol. 9 (2), 1991: 104-126], which are hereby incorporated by reference. Table V shows some examples of the transit peptide sequences disclosed by von Heijne et al. According to the disclosure of the invention especially in the examples the skilled worker is able to link other nucleic acid sequences disclosed by von Heijne et al. to the nucleic acid sequences shown in table I, application no. 2 and/or application no. 3, columns 5 and 7. Most preferred nucleic acid sequences encoding transit peptides are derived from the genus Spinacia such as chlorplast 30S ribosomal protein PSrp-1, root acyl carrier protein II, acyl carrier protein, ATP synthase: γ subunit, ATP synthase: δ subunit, cytochrom f, ferredoxin I, ferredoxin NADP oxidoreductase (=FNR), nitrite reductase, phosphoribulokinase, plastocyanin or carbonic anhydrase. The skilled worker will recognize that various other nucleic acid sequences encoding transit peptides can easely isolated from plastid-localized proteins, which are expressed from nuclear genes as precursors and are then targeted to plastids. Such transit peptides encoding sequences can be used for the construction of other expression constructs. The transit peptides advantageously used in the inventive process and which are part of the inventive nucleic acid sequences and proteins are typically 20 to 120 amino acids, preferably 25 to 110, 30 to 100 or 35 to 90 amino acids, more preferably 40 to 85 amino acids and most preferably 45 to 80 amino acids in length and functions post-tranlationally to direct the protein to the plastid preferably to the chloroplast. The nucleic acid sequences encoding such transit peptides are localized upstream of nucleic acid sequence encoding the mature protein. For the correct molecular joining of the transit peptide encoding nucleic acid and the nucleic acid encoding the protein to be targeted it is sometimes necessary to introduce additional base pairs at the joining position, which forms restriction enzyme recognition sequences useful for the molecular joining of the different nucleic acid molecules. This procedure might lead to very few additional amino acids at the N-terminal of the mature imported protein, which usually and preferably do not interfere with the protein function. In any case, the additional base pairs at the joining position which forms restriction enzyme recognition sequences have to be choosen with care, in order to avoid the formation of stop codons or codons which encode amino acids with a strong influence on protein folding, like e.g. proline. It is preferred that such additional codons encode small n.d. structural flexible amino acids such as glycine or alanine.

[0679] As mentioned above the nucleic acid sequences coding for the proteins as shown in table II, application 2 and/or application no. 3, column 3 and its homologs as disclosed in table I, columns 5 and 7, respectively are joined to a nucleic acid sequence encoding a transit peptide. This nucleic acid sequence encoding a transit peptide ensures transport of the protein to the plastid. The nucleic acid sequence of the gene to be expressed and the nucleic acid sequence encoding the transit peptide are operably linked. Therefore the transit peptide is fused in frame to the nucleic acid sequence coding for proteins as shown in table II, application no. 2 and/or application no. 3, column 3 and its homologs as disclosed in table I, application no. 2 and/or application no. 3, columns 5 and 7.

[0680] The term “organelle” according to the invention shall mean for example “mitochondria” or preferably “plastid” (throughout the specification the “plural” shall comprise the “singular” and vice versa). The term “plastid” according to the invention are intended to include various forms of plastids including proplastids, chloroplasts, chromoplasts, gerontoplasts, leucoplasts, amyloplasts, elaioplasts and etioplasts preferably chloroplasts. They all have as a common ancestor the aforementioned proplasts.

[0681] Other transit peptides are disclosed by Schmidt et al. [J. Biol. Chem., Vol. 268, No. 36,1993: 27447-27457], Della-Cioppa et al. [Plant. Physiol. 84,1987: 965-968], de Castro Silva Filho et al. [Plant Mol. Biol., 30, 1996: 769-780], Zhao et al. [J. Biol. Chem. Vol. 270, No. 11,1995: 6081-6087], Römer et al. [Biochem. Biophys. Res. Commun., Vol. 196, No. 3, 1993: 1414-1421], Keegstra et al. [Annu. Rev. Plant Physiol. Plant Mol. Biol., 40,1989: 471-501], Lubben et al. [Photosynthesis Res., 17, 1988: 173-194] and Lawrence et al. [J. Biol. Chem., Vol. 272, No. 33, 1997: 20357-20363]. A general review about targeting is disclosed by Kermode Allison R. in Critical Reviews in Plant Science 15 (4): 285-423 (1996) under the title “Mechanisms of Intracellular Protein Transport and Targeting in Plant Cells.”

[0682] Favored transit peptide sequences, which are used in the inventive process and which forms part of the inventive nucleic acid sequences are generally enriched in hydroxylated amino acid residues (serine and threonine), with these two residues generally constituting 20-35% of the total. They often have an amino-terminal region empty of Gly, Pro, and charged residues. Furthermore they have a number of small hydrophobic amino acids such as valine and alanine and generally acidic amino acids are lacking. In addition they generally have a middle region rich in Ser, Thr, Lys and Arg. Overall they have very often a net positive charge.

[0683] Alternatively, nucleic acid sequences coding for the transit peptides may be chemically synthesized either in part or wholly according to structure of transit peptide sequences disclosed in the prior art. Said natural or chemically synthesized sequences can be directly linked to the sequences encoding the mature protein or via a linker nucleic acid sequence, which may be typically less than 500 base pairs, preferably less than 450, 400, 350, 300, 250 or 200 base pairs, more preferably less than 150, 100, 90, 80, 70, 60, 50, 40 or 30 base pairs and most preferably less than 25, 20, 15, 12, 9, 6 or 3 base pairs in length and are in frame to the coding sequence. Furthermore favorable nucleic acid sequences encoding transit peptides may comprise sequences derived from more than one biological and/or chemical source and may include a nucleic acid sequence derived from the amino-terminal region of the mature protein, which in its native state is linked to the transit peptide. In a preferred embodiment of the invention said amino-terminal region of the mature protein is typically less than 150 amino acids, preferably less than 140, 130, 120, 110, 100 or 90 amino acids, more preferably less than 80, 70, 60, 50, 40, 35, 30, 25 or 20 amino acids and most preferably less than 19, 18, 17, 16, 15, 14, 13, 12, 11 or 10 amino acids in length. But even shorter or longer stretches are also possible. In addition target sequences, which facilitate the transport of proteins to other cell compartments such as the vacuole, endoplasmic reticulum, golgi complex, glyoxysomes, peroxisomes or mitochondria may be also part of the inventive nucleic acid sequence. The proteins translated from said inventive nucleic acid sequences are a kind of fusion proteins that means the nucleic acid sequences encoding the transit peptide for example the ones shown in table V, preferably the last one of the table are joint to the nucleic acid sequences shown in table I, application no. 2 and/or application no. 3, columns 5 and 7. The person skilled in the art is able to join said sequences in a functional manner. Advantageously the transit peptide part is cleaved off from the protein part shown in table II, application no. 2 and/or application no. 3, columns 5 and 7 during the transport preferably into the plastids. All products of the cleavage of the preferred transit peptide shown in the last line of table V have preferably the N-terminal amino acid sequences QIA CSS or QIA EFQLTT in front of the start methionine of the protein metioned in table II, columns 5 and 7. Other short amino acid sequences of an range of 1 to 20 amino acids preferable 2 to 15 amino acids, more preferable 3 to 10 amino acids most preferably 4 to 8 amino acids are also possible in front of the start methionine of the protein mentioned in table II, columns 5 and 7. In case of the amino acid sequence QIA CSS the three amino acids in front of the start methionine are stemming from the LIC (=ligatation independent cloning) cassette. Said short amino acid sequence is preferred in the case of the expression of E. coli genes. In case of the amino acid sequence QIA EFQLTT the six amino acids in front of the start methionine are stemming from the LIC cassette. Said short amino acid sequence is preferred in the case of the expression of S. cerevisiae genes. The skilled worker knowns that other short sequences are also useful in the expression of the genes mentioned in table I, application no. 2 and/or application no. 3, columns 5 and 7. Furthermore the skilled worker is aware of the fact that there is not a need for such short sequences in the expression of the genes.

TABLE V

Examples of transit peptides disclosed by von
Heijne et al.

| | | | SEQ | |
|---|---|---|---|---|
| Trans | | | ID | |
| Pep | Organism | Transit Peptide | NO: | Reference |
| 1 | Acetabularia | MASIMMNKSVVLSKECAKPLATPK | 960 | Mol. Gen. |
| | mediterranea | VTLNKRGFATTIATKNREMMVWQP | | Genet. |
| | | FNNKMFETFSFLPP | | 218:445- |
| | | | | 452 (1989) |
| 2 | Arabidopsis | MAASLQSTATFLQSAKIATAPSRG | 971 | EMBO J. |
| | thaliana | SSHLRSTQAVGKSFGLETSSARLT | | 8:3187- |
| | | CSFQSDFKDFTGKCSDAVKIAGFA | | 3194 (1989) |
| | | LATSALVVSGASAEGAPK | | |
| 3 | Arabidopsis | MAQVSRICNGVQNPSLICNLSKSS | 972 | Mol. Gen. |
| | thaliana | QRKSPLSVSLKTQQHPRAYPISSS | | Genet. 210: |
| | | WGLKKSGMTLIGSELRPLKVMSSV | | 437-442 |
| | | STAEKASEIVLQPIREISGLIKLP | | (1987) |
| 4 | Arabidopsis | MAAATTTTTTSSSISFSTKPSPSS | 973 | Plant |
| | thaliana | SKSPLPISRFSLPFSLNPNKSSSS | | Physiol. |
| | | SRRRGIKSSSP SS ISAVLNTTT | | 85:1110- |
| | | NVTTTPSPTKPTKPETF ISRFAP | | 1117 |
| | | DQPRKGA | | (1987) |
| 5 | Arabidopsis | MITSSLTCSLQALKLSSPFAHGST | 974 | J. Biol. |
| | thaliana | PLSSLSKPNSFPNHRMPALVPV | | Chem. |
| | | | | 2652763- |
| | | | | 2767 (1990) |
| 6 | Arabidopsis | MASLLGTSSSAIWASPSLSSPSSK | 975 | EMBO J. |
| | thaliana | PSSSPICFRPGKLFGSKLNAGIQI | | 9:1337- |
| | | RPKKNRSRYHVSVMNVATEINSTE | | 1346 (1990) |
| | | QVVGKFDSKKSARPVYPFAAI | | |
| 7 | Arabidopsis | MASTALSSAIVGTSFIRRSPAPIS | 976 | Plant |
| | thaliana | LRSLPSANTQSLFGLKSGTARGG | | Physiol. 93: |
| | | RVVAM | | 572-577 |
| | | | | (1990) |
| 8 | Arabidopsis | MAASTMALSSPAFAGKAVNLSPAA | 977 | Nucl. Acids |
| | thaliana | SEVLGSGRVTNRKTV | | Res. 14: |
| | | | | 4051-4064 |
| | | | | (1986) |
| 9 | Arabidopsis | MAAITSATVTIPSFTGLKLAVSSK | 978 | Gene 65: |
| | thaliana | PKTLSTISRSSSATRAPPKLALKS | | 59-69 |
| | | SLKDFGVIAVATAASIVLAGNAMA | | (1988) |
| | | MEVLLGSDDGSLAFVPSEFT | | |
| 10 | Arabidopsis | MAAAVSTVGAINRAPLSLNGSGSG | 961 | Nucl. Acids |
| | thaliana | AVSAPASTFLGKKVVTVSRFAQSN | | Res. 17: |
| | | KKSNGSFKVLAVKEDKQTDGDRWR | | 2871 |
| | | GLAYDTSDDQIDI | | (1989) |
| 11 | Arabidopsis | MkSSMLSSTAWTSPAQATMVAPF | 962 | Plant Mol. |
| | thaliana | TGLKSSASFPVTRKANNDITSITS | | Biol. 11: |
| | | NGGRVSC | | 745-759 |
| | | | | (1988) |
| 12 | Arabidopsis | MAASGTSATFRASVSSAPSSSSQL | 963 | Proc. Natl. |
| | thaliana | THLKSPFKAVKY TPLPS SRSKS | | Acad. Sci. |
| | | SSFSVSCTIAKDPPVLMAAGSDPA | | USA, 86: |
| | | LWQRPDSFGRFGKFGGKYVPE | | 4604-4608 |
| | | | | (1989) |
| 13 | Brassica | MSTTFCSSVCMQATSLAATTRISF | 964 | Nucl. Acids |
| | campestris | QKPALVSTTNLSFNLRRSIPTRFS | | Res. 15: |
| | | ISCAAKPETVEKVSKIVKKQLSLK | | 7197 |
| | | DDQKVVAE | | (1987) |
| 14 | Brassica | MATTFSASVSMQATSLATTTRISF | 965 | Eur. J. |
| | napus | QKPVLVSNHGRTNLSFNLSRTRLS | | Biochem. |
| | | ISC | | 174: 287- |
| | | | | 295 (1988) |
| 15 | Chlamydomonas | MQALSSRVNIAAKPQRAQRLVVRA | 966 | Plant Mol. |
| | reinhardtii | EEVKAAPKKEVGPKRGSLVK | | Biol. 12: |
| | | | | 463-474 |
| | | | | (1989) |
| 16 | Cucurbita | MAELIQDKESAQSAATAAAASSGY | 967 | FEBS Lett. |
| | moschata | ERRNEPAHSRKFLEVRSEEELLSC | | 238: 424- |
| | | IKK | | 430 (1988) |
| 17 | Spinacea | MSTINGCLTSISPSRTQLKNTSTL | 968 | J. Biol. |
| | oleracea | RPTFIANSRVNPSSSVPPSLIRNQ | | Chem. 265: |
| | | PVFAAPAPIITPTL | | 105414- |
| | | | | 5417 |
| | | | | (1990) |
| 18 | Spinacea | MTTAVTAAVSFPSTKTTSLSARCS | 969 | Curr. |
| | oleracea | SVISPDKISYKKVPLYYRNVSATG | | Genet. 13: |
| | | KMGPIRAQIASDVEAPPPAPAKVE | | 517-522 |
| | | KMS | | (1988) |
| 19 | Spinacea | MTTAVTAAVSFPSTKTTSLSARSS | 970 | |
| | oleracea | SVISPDKISYKKVPLYYRNVSATG | | |
| | | KMGPIRA | | |

[0684] Alternatively to the targeting of the sequences shown in table II, application no. 2 and/or application no. 3, columns 5 and 7 preferably of sequences in general encoded in the nucleus with the aid of the targeting sequences mentioned for example in table V alone or in combination with other targeting sequences preferably into the plastids, the nucleic acids of the invention can directly introduced into the plastidal genome. Preferably the nucleic acid sequences shown in table I, application no. 2 and/or application no. 3, columns 5 and 7 are directly introduced into the plastidal genome in such a way that they are under control of a promoter active in plastids.

[0685] Therefore in a preferred embodiment the nucleic acid sequences shown in table I, application no. 2 and/or application no. 3, columns 5 and 7 are directly introduced and expressed in plastids.

[0686] The term “introduced” in the context of this specification shall mean the insertion of a nucleic acid sequence into the organism by means of a “transfection”, “transduction” or preferably by “transformation”.

[0687] A plastid, such as a chloroplast, has been “transformed” by an exogenous (preferably foreign) nucleic acid sequence if nucleic acid sequence has been introduced into the plastid that means that this sequence has crossed the membrane or the membranes of the plastid. The foreign DNA may be integrated (covalently linked) into plastid DNA making up the genome of the plastid, or it may remain unintegrated (e.g., by including a chloroplast origin of replication). “Stably” integrated DNA sequences are those, which are inherited through plastid replication, thereby transferring new plastids, with the features of the integrated DNA sequence to the progeny.

[0688] For expression a person skilled in the art is familiar with different methods to introduce the nucleic acid sequences into different organelles such as the preferred plastids. Such methods are for example disclosed by Pal Maiga (Annu. Rev. Plant Biol., 2004, 55: 289-313), Thomas Evans (WO 2004/040973), Kevin E. McBride et al. (U.S. Pat. No. 5,455,818), Henry Daniell et al. (U.S. Pat. No. 5,932,479 and U.S. Pat. No. 5,693,507) and Jeffrey M. Straub et al. (U.S. Pat. No. 6,781,033). A preferred method is the transformation of microspore-derived hypocotyl or cotyledonary tissue (which are green and thus contain numerous plastids) leaf tissue and afterwards the regeneration of shoots from said transformed plant material on selective medium. As methods for the transformation bombarding of the plant material or the use of independently replicating shuttle vectors are well known by the skilled worker. But also a PEG-mediated transformation of the plastids or Agrobacterium transformation with binary vectors are possible. Useful markers for the transformation of plastids are positive selection markers for example the chloramphenicol-, streptomycin-, kanamycin-, neomycin-, amikamycin-, spectinomycin-, triazine- and/or lincomycin-resistance genes. As additional markers named in the literature often as secondary markers, genes coding for the resistance against herbicides such as phosphinothricin (=glufosinate, BASTA™, Liberty™, encoded by the bar gene), glyphosate (═N-(phosphonomethyl)glycine, Roundup Ready™, encoded by the 5-enolpyruvylshikimaete-3-phosphate synthase gene=epsps), sulfonylurea (=Staple™, encoded by the acetolactate synthase gene), imidazolinone [=IMI, imazethapyr, imazamox, Clearfield™, encoded by the acetohydroxyacid synthase (AHAS) gene, also known as acetolactate synthase (ALS) gene] or bromoxynil (=Buctril™, encoded by the oxy gene) or genes coding for antibiotics such as hygromycin or G418 are useful for further selection. Such secondary markers are useful in the case when most genome copies are transformed. In addition negative selection markers such as the bacterial cytosine deaminase (encoded by the codA gene) are also useful for the transformation of plastids.

[0689] To increase the possibility of identification of transformants it is also diserable to use reporter genes other then the aforementioned resistance genes or in addition to said genes. Reporter genes are for example β-galactosidase-, β-glucuronidase-(GUS), alkaline phosphatase- and/or green-fluorescent protein-genes (GFP).

[0690] For the inventive process it is of great advantage that by transforming the plastids the intraspecies specific transgene flow is blocked, because a lot of species such as corn, cotton and rice have a strict maternal inheritance of plastids. By placing the genes specified in table I, application no. 2 and/or application no. 3, columns 5 and 7 or active fragments thereof in the plastids of plants, these genes will not be present in the pollen of said plants.

[0691] A further preferred embodiment of the invention relates to the use of so called “chloroplast localization sequences”, in which a first RNA sequence or molecule is capable of transporting or “chaperoning” a second RNA sequence, such as a RNA sequence transcribed from the sequences selected from the group as depicted in table I, application no. 2 and/or application no. 3, columns 5 and 7 or a sequence encoding a protein selected from the group as as depicted in table II, application no. 2 and/or application no. 3, columns 5 and 7, from an external environment inside a cell or outside a plastid into a chloroplast. In one embodiment the chloroplast localization signal is substantially similar or complementary to a complete or intact viroid sequence. The chloroplast localization signal may be encoded by a DNA sequence, which is transcribed into the chloroplast localization RNA. The term “viroid” refers to a naturally occurring single stranded RNA molecule (Flores, C R Acad Sci III. 2001 October; 324(10):943-52). Viroids usually contain about 200-500 nucleotides and generally exist as circular molecules. Examples of viroids that contain chloroplast localization signals include but are not limited to ASBVd, PLMVd, CChMVd and ELVd. The viroid sequence or a functional part of it can be fused to the sequences selected from the group as depicted in table I, application no. 2 and/or application no. 3, columns 5 and 7 or a sequence encoding a protein selected from the group as depicted in table II, application no. 2 and/or application no. 3, columns 5 and 7 in such a manner that the viroid sequence transports a sequence transcribed from a sequence as depicted in table I, application no. 2 and/or application no. 3, columns 5 and 7 or a sequence encoding a protein as depicted in table II, application no. 2 and/or application no. 3, columns 5 and 7 into the chloroplasts. A preferred embodiment uses a modified ASBVd (Navarro et al., Virology. 2000 Mar. 1; 268(1):218-25).

[0692] In a further specific embodiment the protein to be expressed in the plastids such as the proteins selected from the group as depicted in table II, application no. 2 and or application no. 3, columns 5 and 7 are encoded by different nucleic acids. Such a method is disclosed in WO 2004/040973, which shall be incorporated by reference. WO 2004/040973 teaches a method, which relates to the translocation of an RNA corresponding to a gene or gene fragment into the chloroplast by means of a chloroplast localization sequence. The genes, which should be expressed in the plant or plants cells, are split into nucleic acid fragments, which are introduced into different compartments in the plant e.g. the nucleus, the plastids and/or mitochondria. Additionally plant cells are described in which the chloroplast contains a ribozyme fused at one end to an RNA encoding a fragment of a protein used in the inventive process such that the ribozyme can trans-splice the translocated fusion RNA to the RNA encoding the gene fragment to form and as the case may be reunite the nucleic acid fragments to an intact mRNA encoding a functional protein for example selected from the group as disclosed in table II, application no. 2 and/or application no. 3, columns 5 and 7.

[0693] In a preferred embodiment of the invention the nucleic acid sequences selected from the group as shown in table I, application no. 2 and/or application no. 3, columns 5 and 7 used in the inventive process are transformed into plastids, which are metabolical active. Those plastids should preferably maintain at a high copy number in the plant or plant tissue of interest, most preferably the chloroplasts found in green plant tissues, such as leaves or cotyledons or in seeds.

[0694] For a good expression in the plastids the nucleic acid sequences as shown in table I, application no. 2 and/or application no. 3, columns 5 and 7 are introduced into an expression cassette using a preferably a promoter and terminater, which are active in plastids preferably a chloroplast promoter and chloroplast terminater respectively. Examples of such promoters include the psbA promoter from the gene from spinach or pea, the rbcL promoter, and the atpB promoter from corn.

[0695] Surprisingly it was found, that the transgenic expression of the protein selected from the group as shown in table II, application no. 2 and/or application no. 3, column 3 in plastids of a plant such as Arabidopsis thaliana for example through the linkage to at least one targeting sequence for example as mentioned in table V conferred an increase in nitrogen or nitrogen containing compounds content of the transformed plants.

[0696] In one embodiment, in the process of the present invention the activity of a protein selected from the group as shown in table II, application no. 2 and/or application no. 3, column 3 is increased or generated, or a homolog thereof, preferably linked at least to one transit peptide as mentioned for example in table V.

[0697] In another embodiment, in the process of the present invention the activity of a a protein selected from the group as shown in table II, application no. 2 and/or application no. 3, column 3 is increased or generated in a subcellular compartment of the organism or organism cell such as in an organelle like a plastid or mitochondria.

[0698] The sequence of YNL241C (Accession number NP_{—}014158) from Saccharomyces cerevisiae has been published in Goffeau et al., Science 274 (5287), 546-547,1996 and Philippsen et al., Nature 387 (6632 Suppl), 93-98 (1997), and its activity is being defined as “glucose-6-phosphate dehydrogenase (Zwf1p)”.

[0699] Accordingly, in one embodiment, the process of the present invention comprises the use of said “glucose-6-phosphate dehydrogenase” or its homolog, preferably in plastids, e.g. as shown herein, for the production of nitrogen or nitrogen containing compounds and/or for conferring an enhanced nitrogen assimilation, accumulation and/or utilization and/or a increased total nitrogen content, meaning of a N-containing compound, in particular for increasing the amount of a N-containing compound in an organism or a part thereof, as mentioned.

[0700] Accordingly, in one embodiment, the process of the present invention comprises the use of said “glucose-6-phosphate dehydrogenase” or its homolog, preferably in plastids, e.g. as shown herein, for the production of nitrogen or nitrogen containing compounds and/or for conferring an enhanced nitrogen assimilation, accumulation and/or utilization and/or a increased total nitrogen content, meaning of a N-containing compound, in particular for the improved uptake and/or assimilation of nitrogen. Accordingly, in one embodiment, the process of the present invention comprises the use of said “glucose-6-phosphate dehydrogenase” or its homolog, preferably in plastids, e.g. as shown herein, for the production of nitrogen or nitrogen containing compounds and/or for conferring an enhanced nitrogen assimilation, accumulation and/or utilization and/or a increased total nitrogen content, meaning of a N-containing compound, in particular for the increased uptake and/or utilization and/or assimilation of nitrogen under nitrogen limited conditions.

[0701] The sequence of b1852 (Accession number NP_{—}416366) from Escherichia coli has been published in Blattner et al., Science 277 (5331), 1453-1474 (1997), and its activity is being defined as “glucose-6-phosphate dehydrogenase”. Accordingly, in one embodiment, the process of the present invention comprises the use of a “glucose-6-phosphate dehydrogenase” or its homolog, preferably in plastids, e.g. as shown herein, for the production of nitrogen or nitrogen containing compounds and/or for conferring an enhanced nitrogen assimilation, accumulation and/or utilization and/or a increased total nitrogen content, meaning of a N-containing compound, in particular for increasing the amount of a N-containing compound in an organism or a part thereof, as mentioned.

[0702] Accordingly, in one embodiment, the process of the present invention comprises the use of a “glucose-6-phosphate dehydrogenase” or its homolog, preferably in plastids, e.g. as shown herein, for the production of nitrogen or nitrogen containing compounds and/or for conferring an enhanced nitrogen assimilation, accumulation and/or utilization and/or a increased total nitrogen content, meaning of a N-containing compound, in for the improved uptake and/or assimilation of nitrogen.

[0703] Accordingly, in one embodiment, the process of the present invention comprises the use of a “glucose-6-phosphate dehydrogenase” or its homolog, preferably in plastids, e.g. as shown herein, for the production of nitrogen or nitrogen containing compounds and/or for conferring an enhanced nitrogen assimilation, accumulation and/or utilization and/or a increased total nitrogen content, meaning of a N-containing compound, in particular for the increased uptake and/or utilization and/or assimilation of nitrogen under nitrogen limited conditions.

[0704] The sequence of YJL167W (Accession number NP_{—}012368.1) from Saccharomyces cerevisiae has been published in Goffeau et al., Science 274 (5287), 546-547,1996 and Anderson et al., J. Biol. Chem. 264, 19176-19184 (1989), and its activity is being defined as “farnesyl pyrophosphate synthetase (FPP synthase)”. Accordingly, in one embodiment, the process of the present invention comprises the use of said “farnesyl pyrophosphate synthetase (FPP synthase)” or its homolog, preferably in plastids, e.g. as shown herein, for the production of nitrogen or nitrogen containing compounds and/or for conferring an enhanced nitrogen assimilation, accumulation and/or utilization and/or a increased total nitrogen content, meaning of a N-containing compound, in particular for increasing the amount of a N-containing compound in an organism or a part thereof, as mentioned.

[0705] Accordingly, in one embodiment, the process of the present invention comprises the use of said “farnesyl pyrophosphate synthetase (FPP synthase)” or its homolog, preferably in plastids, e.g. as shown herein, for the production of nitrogen or nitrogen containing compounds and/or for conferring an enhanced nitrogen assimilation, accumulation and/or utilization and/or a increased total nitrogen content, meaning of a N-containing compound, in particular for the improved uptake and/or assimilation of nitrogen.

[0706] Accordingly, in one embodiment, the process of the present invention comprises the use of said “farnesyl pyrophosphate synthetase (FPP synthase)” or its homolog, preferably in plastids, e.g. as shown herein, for the production of nitrogen or nitrogen containing compounds and/or for conferring an enhanced nitrogen assimilation, accumulation and/or utilization and/or a increased total nitrogen content, meaning of a N-containing compound, in particular for the increased uptake and/or utilization and/or assimilation of nitrogen under nitrogen limited conditions.

[0707] The sequence of YML045C (Accession number NP_{—}013658.1) from Saccharomyces cerevisiae has been published in Goffeau et al., Science 274 (5287), 546-547,1996 and Guiard et al., EMBO J. 4, 3265-3272 (1985), and its activity is being defined as “L-lactate cytochrome c oxidoreductase/cytochrome b2”. Accordingly, in one embodiment, the process of the present invention comprises the use of said “L-lactate cytochrome c oxidoreductase/cytochrome b2” or its homolog, preferably in plastids, e.g. as shown herein, for the production of nitrogen or nitrogen containing compounds and/or for conferring an enhanced nitrogen assimilation, accumulation and/or utilization and/or a increased total nitrogen content, meaning of a N-containing compound, in particular for increasing the amount of a N-containing compound in an organism or a part thereof, as mentioned.

[0708] Accordingly, in one embodiment, the process of the present invention comprises the use of said “L-lactate cytochrome c oxidoreductase/cytochrome b2” or its homolog, preferably in plastids, e.g. as shown herein, for the production of nitrogen or nitrogen containing compounds and/or for conferring an enhanced nitrogen assimilation, accumulation and/or utilization and/or a increased total nitrogen content, meaning of a N-containing compound, in particular for the improved uptake and/or assimilation of nitrogen.

[0709] Accordingly, in one embodiment, the process of the present invention comprises the use of said “L-lactate cytochrome c oxidoreductase/cytochrome b2” or its homolog, preferably in plastids, e.g. as shown herein, for the production of nitrogen or nitrogen containing compounds and/or for conferring an enhanced nitrogen assimilation, accumulation and/or utilization and/or a increased total nitrogen content, meaning of a N-containing compound, in particular for the increased uptake and/or utilization and/or assimilation of nitrogen under nitrogen limited conditions.

[0710] For example, the molecule number or the specific activity of the polypeptide or the nucleic acid molecule may be increased. Larger amounts of the N-containing compound can be produced if the polypeptide or the nucleic acid of the invention is expressed de novo in an organism lacking the activity of said protein, preferably the nucleic acid molecules selected from the group as mentioned in table I, application no. 2 and/or application no. 3, columns 5 and 7 alone or preferably in combination with a transit peptide for example as mentioned in table V or in another embodiment by introducing said nucleic acid molecules into an organelle such as an plastid or mitochondria in the transgenic organism. However, it is also possible to modify the expression of the gene which is naturally present in the organisms, for example by integrating a nucleic acid sequence, encoding a plastidic targeting sequence in front (5 prime) of the coding sequence, leading to a functional preprotein, which is directed for example to the plastids.

[0711] In one embodiment, in case the activity of the Saccharomyces cerevisiae protein YNL241C or its homologs, e.g. as indicated in Table II, columns 5 or 7, line 3, is increased preferably in a cellular compartment, preferably in the plastids, preferably, an increase of nitrogen or nitrogen containing compounds, preferably of total nitrogen content between 9% and 12% or more is conferred, preferably an increase of amino acid content in a plant between 14% and 27% or more is conferred.

[0712] In one embodiment, in case the activity of the Saccharomyces cerevisiae protein YNL241C or its homologs is increased preferably in a cellular compartment, preferably in the plastids, preferably, an increase of nitrogen or nitrogen containing compounds and of fatty acids, phytosterol, fructose and/or glucose in leaves and/or carbohydrate in seeds of a plant is conferred.

[0713] In one embodiment, in case the activity of the E. coli protein b1852 or its homologs, e.g. as indicated in Table II, columns 5 or 7, line 2, is increased preferably in a cellular compartment, preferably in the plastids, preferably, an increase of nitrogen or nitrogen containing compounds, preferably of total nitrogen content between 6% and 13% or more is conferred, preferably an increase of amino acid content in a plant between 28% and 62% or more is conferred.

[0714] In one embodiment, in case the activity of the Saccharomyces cerevisiae protein YJL167W or its homologs, e.g. as indicated in Table II, columns 5 or 7, application no. 3, line 4, is increased, preferably in a cellular compartment, preferably in the plastids, preferably, an increase of nitrogen or nitrogen containing compounds between 5% and 30% or more, preferably between 8% and 26% or more is conferred preferably in the seeds.

[0715] In one embodiment, in case the activity of the Saccharomyces cerevisiae protein YML054C or its homologs, e.g. as indicated in Table II, columns 5 or 7, application no. 3, line 5, is increased, preferably in a cellular compartment, preferably in the plastids, preferably, an increase of nitrogen or nitrogen containing compounds between 5% and 20% or more, preferably between 6% and 15% or more is conferred preferably in the seeds.

[0716] In one embodiment, the process of the present invention comprises one or more of the following steps
[0717] a) stabilizing a protein conferring the increased expression of a protein encoded by the nucleic acid molecule of the invention or of the polypeptide of the invention, e.g. of a polypeptide having the activity of a protein selected from the group as indicated in table II, application no. 2 and/or application no. 3, columns 5 and 7 or its homologs activity having herein-mentioned N-containing compound increasing activity preferably in a cellular compartment, preferably in the plastids; and/or
[0718] b) stabilizing a mRNA conferring the increased expression of a protein encoded by the nucleic acid molecule of the invention, which is in the sense of the invention a fusion of a nucleic acid sequence encoding a transit peptide and of a nucleic acid sequence selected from the group as shown in table I, application no. 2 and/or application no. 3, columns 5 and 7, e.g. a nucleic acid sequence encoding a polypeptide having the activity of a protein selected from the group as indicated in table II, application no. 2 and/or application no. 3, columns 5 and 7 or its homologs or of a mRNA encoding the polypeptide of the present invention having herein-mentioned N-containing compound increasing activity; and/or
[0719] c) increasing the specific activity of a protein conferring the increased expression of a protein encoded by the nucleic acid molecule of the invention or of the polypeptide of the present invention having herein-mentioned N-containing compound increasing activity, e.g. of a polypeptide having the activity of a protein selected from the group as indicated in table II, application no. 2 and/or application no. 3, columns 5 and 7 or its homologs activity preferably in a cellular compartment, preferably in the plastids, or decreasing the inhibitory regulation of the polypeptide of the invention; and/or
[0720] d) generating or increasing the expression of an endogenous or artificial transcription factor mediating the expression of a protein conferring the increased expression of a protein encoded by the nucleic acid molecule of the invention or of the polypeptide of the invention having herein-mentioned N-containing compound increasing activity, e.g. of a polypeptide having the activity of a protein selected from the group as indicated in table II, application no. 2 and/or application no. 3, columns 5 and 7 or its homologs preferably in a cellular compartment, preferably in the plastids; and/or
[0721] e) stimulating activity of a protein conferring the increased expression of a protein encoded by the nucleic acid molecule of the present invention or a polypeptide of the present invention having herein-mentioned N-containing compound increasing activity, e.g. of a polypeptide having the activity of a protein selected from the group as indicated in table II, application no. 2 and/or application no. 3, columns 5 and 7 or its homologs activity preferably in a cellular compartment, preferably in the plastids, by adding one or more exogenous inducing factors to the organisms or parts thereof; and/or
[0722] f) expressing a transgenic gene encoding a protein conferring the increased expression of a polypeptide encoded by the nucleic acid molecule of the present invention or a polypeptide of the present invention preferably in a cellular compartment, preferably in the plastids, having herein-mentioned N-containing compound increasing activity, e.g. of a polypeptide having the activity of a protein selected from the group as indicated in table II, application no. 2 and/or application no. 3, columns 5 and 7 or its homologs activity, and/or
[0723] g) increasing the copy number of a gene conferring the increased expression of a nucleic acid molecule encoding a polypeptide encoded by the nucleic acid molecule of the invention or the polypeptide of the invention having herein-mentioned N-containing compound increasing activity, e.g. of a polypeptide having the activity of a protein selected from the group as indicated in table II, application no. 2 and/or application no. 3, columns 5 and 7 or its homologs activity; and/or
[0724] h) increasing the expression of the endogenous gene encoding the polypeptide of the invention, e.g. a polypeptide having the activity of a protein selected from the group as indicated in table II, application no. 2 and/or application no. 3, columns 5 and 7 or its homologs activity preferably in a cellular compartment, preferably in the plastids, by adding positive expression or removing negative expression elements, e.g. homologous recombination can be used to either introduce positive regulatory elements like for plants the 35S enhancer into the promoter or to remove repressor elements form regulatory regions. Further gene conversion methods can be used to disrupt repressor elements or to enhance to activity of positive elements. Positive elements can be randomly introduced in plants by T-DNA or transposon mutagenesis and lines can be identified in which the positive elements have be integrated near to a gene of the invention, the expression of which is thereby enhanced; and/or
[0725] i) modulating growth conditions of an organism in such a manner, that the expression or activity of the gene encoding the protein of the invention or the protein itself is enhanced for example microorganisms or plants can be grown for example under a higher temperature regime leading to an enhanced expression of heat shock proteins, which can lead an enhanced production of nitrogen or nitrogen containing compounds; and/or
[0726] j) selecting of organisms with especially high activity of the proteins of the invention preferably in a cellular compartment, preferably in the plastids, from natural or from mutagenized resources and breeding them into the target organisms, e.g. the elite crops; and/or
[0727] k) directing a protein encoded by the nucleic acid molecule of the invention or of the polypeptide of the present invention having herein-mentioned N-containing compound increasing activity, e.g. of a polypeptide having the activity of a protein selected from the group as indicated in table II, application no. 2 and/or application no. 3, columns 5 and 7 or its homologs activity, to the plastids by the addition of a plastidial targeting sequence; and/or
[0728] l) generating the expression of a protein encoded by the nucleic acid molecule of the invention or of the polypeptide of the present invention having herein-mentioned N-containing compound increasing activity, e.g. of a polypeptide having the activity of a protein selected from the group as indicated in table II, application no. 2 and/or application no. 3, columns 5 and 7 or its homologs activity in plastids by the stable or transient transformation advantageously stable transformation of organelles preferably plastids with an inventive nucleic acid sequence preferably in form of an expression cassette containing said sequence leading to the plastidial expression of the nucleic acids or polypeptides of the invention; and/or
[0729] m) generating the expression of a protein encoded by the nucleic acid molecule of the invention or of the polypeptide of the present invention having herein-mentioned N-containing compound increasing activity, e.g. of a polypeptide having the activity of a protein selected from the group as indicated in table II, application no. 2 and/or application no. 3, columns 5 and 7 or its homologs activity in plastids by integration of a nucleic acid of the invention into the plastidal genome under control of preferable a plastidial promoter.

[0730] One can also envisage to introduce nucleic acids sequences, encoding plastidal targeting signals, like for example present in table V, by homologous recombination or other methods of site specific integration, into the genome in that way, that an endogenous gene is functionally fused to the targeting sequence and the protein is redirected to to the plastids. Eventually the integration can also occur randomly and the desired fusion event is selected for.

[0731] In a preferred embodiment, the present invention relates to a process for the accumulation and/or production of nitrogen or nitrogen containing compounds respectively comprising or generating in an organism or a part thereof, preferably in a cell compartment such as a plastid or mitochondria, the expression of at least one nucleic acid molecule comprising a nucleic acid molecule selected from the group consisting of:
[0732] a) nucleic acid molecule encoding, preferably at least the mature form, of the polypeptide selected from the group shown in table II, application no. 2 and/or application no. 3, columns 5 and 7 or a fragment thereof, which confers an increase in the amount of nitrogen or nitrogen containing compounds in an organism or a part thereof;
[0733] b) nucleic acid molecule comprising, preferably at least the mature form, of the nucleic acid molecule selected from the group shown in table I, application no. 2 and/or application no. 3, columns 5 and 7;
[0734] c) nucleic acid molecule whose sequence can be deduced from a polypeptide sequence encoded by a nucleic acid molecule of (a) or (b) as result of the degeneracy of the genetic code and conferring an increase in the amount of nitrogen or nitrogen containing compounds in an organism or a part thereof;
[0735] d) nucleic acid molecule encoding a polypeptide which has at least 50% identity with the amino acid sequence of the polypeptide encoded by the nucleic acid molecule of (a) to (c) and conferring an increase in the amount of nitrogen or nitrogen containing compounds in an organism or a part thereof;
[0736] e) nucleic acid molecule which hybridizes with a nucleic acid molecule of (a) to (c) under under stringent hybridisation conditions and conferring an increase in the amount of nitrogen or nitrogen containing compounds in an organism or a part thereof;
[0737] f) nucleic acid molecule encoding a polypeptide, the polypeptide being derived by substituting, deleting and/or adding one or more amino acids of the amino acid sequence of the polypeptide encoded by the nucleic acid molecules (a) to (d), preferably to (a) to (c) and conferring an increase in the amount of nitrogen or nitrogen containing compounds in an organism or a part thereof;
[0738] g) nucleic acid molecule encoding a fragment or an epitope of a polypeptide which is encoded by one of the nucleic acid molecules of (a) to (e), preferably to (a) to (c) and conferring an increase in the amount of nitrogen or nitrogen containing compounds in an organism or a part thereof;
[0739] h) nucleic acid molecule comprising a nucleic acid molecule which is obtained by amplifying nucleic acid molecules from a cDNA library or a genomic library using the primers shown in table III, application no. 2 and/or application no. 3, column 7 and conferring an increase in the amount of nitrogen or nitrogen containing compounds in an organism or a part thereof;
[0740] i) nucleic acid molecule encoding a polypeptide which is isolated, e.g. from an expression library, with the aid of monoclonal antibodies against a polypeptide encoded by one of the nucleic acid molecules of (a) to (h), preferably to (a) to (c), and conferring an increase in the amount of nitrogen or nitrogen containing compounds in an organism or a part thereof;
[0741] j) nucleic acid molecule which encodes a polypeptide comprising the consensus sequence selected from the group shown in table IV, application no. 2 and/or application no. 3, column 7 and conferring an increase in the amount of nitrogen or nitrogen containing compounds in an organism or a part thereof;
[0742] k) nucleic acid molecule comprising one or more of the nucleic acid molecule encoding the amino acid sequence of a polypeptide encoding a domain of the polypeptide selected from the group shown in table II, application no. 2 and/or application no. 3, columns 5 and 7 and conferring an increase in the amount of nitrogen or nitrogen containing compounds in an organism or a part thereof; and
[0743] l) nucleic acid molecule which is obtainable by screening a suitable library under stringent conditions with a probe comprising one of the sequences of the nucleic acid molecule of (a) to (k), preferably to (a) to (c), or with a fragment of at least 15 nt, preferably 20 nt, 30 nt, 50 nt, 100 nt, 200 nt or 500 nt of the nucleic acid molecule characterized in (a) to (k), preferably to (a) to (c), and conferring an increase in the amount of nitrogen or nitrogen containing compounds in an organism or a part thereof;
   or which comprises a sequence which is complementary thereto.

[0744] Nucleic acid molecules with the sequence shown in table I, application no. 2 and/or application no. 3, columns 5 and 7, nucleic acid molecules which are derived from the amino acid sequences shown in table II, application no. 2 and/or application no. 3, columns 5 and 7 or from polypeptides comprising the consensus sequence shown in table IV, application no. 2 and/or application no. 3, column 7, or their derivatives or homologues encoding polypeptides with the enzymatic or biological activity of a protein as shown in table II, application no. 2 and/or application no. 3, column 3 or conferring nitrogen or nitrogen containing compounds increase after increasing its expression or activity are advantageously increased in the process according to the invention by expression either in the cytsol or in an organelle such as a plastid or mitochondria or both, preferably in plastids.

[0745] The nucleic acid molecules used in the process according to the invention take the form of isolated nucleic acid sequences, which encode polypeptides with the activity of the proteins selected from the group as shown in table II, application no. 2 and/or application no. 3, column 3 and conferring nitrogen or nitrogen containing compounds increase increase by expression either in the cytsol or in an organelle such as a plastid or mitochondria or both, preferably in plastids.

[0746] The nucleic acid sequence according to the invention mentioned above is advantageously functionally joined to a nucleic acid sequence encoding a transit peptide, in such a manner that a preprotein is translated, which is able to direct the polypeptide to the organelle such as to the plastid. In another preferred embodiment the nucleic acids according to the invention mentioned above is advantageously functionally joined to a promotor region functional in plastids like for example the RNA operon promoter fused to the 5′UTR of the rbcL gene and in another preferred embodiment joined to a plastome sequences homologous to the integration sites. Example for useful integration sites are the trnV-rps12/7 (Skidar et al., Plant Cell Rep. 1998, 18: 20-24 and other reports), thr rbvL-aacD site (Svab et al. 1993, Proc. Natl. Acad. Sci. USA 90: 913-917), the trnI-trnA site (De Cosa et al., 2001, Nat. Biotech. 19, 71-74) the rps7-ndhB site (Hou et al., 2003, Transgenic Res. 12, 111-114) and the ndhF-trnL site Zhang et al., 2001c, Plant Physiol. 127, 131-141)

[0747] The nucleic acid sequence coding for the transit peptide is advantageously derived from a nucleic acid sequence encoding a protein finally resided in the plastid and is stemming from an organism selected from the group consisting of the Genera

[0748] Acetabularia, Arabidopsis, Brassica, Chlamydomonas, Cururbita, Dunaliella, Euglena, Flayeria, Glycine, Helianthus, Hordeum, Lemna, Lolium, Lycopersion, Malus, Mesembryanthemum, Nicotiana, Oenotherea, Oryza, Petunia, Phaseolus, Physcomitrella, Pinus, Pisum Raphanus, Silene, Sinapis, Solanum, Spinacea, Triticum and Zea.

[0749] Preferably the transit peptide is derived from a protein selected from the group consisting of

ribulose bisphosphate carboxylase/oxygenase, 5-enolpyruvyl-shikimate-3-phosphate synthase, acetolactate synthase, chloroplast ribosomal protein CS17, Cs protein, ferredoxin, plastocyanin, ribulose bisphosphate carboxylase activase, tryptophan synthase, acyl carrier protein, plastid chaperonin-60, cytochrome c₅₅₂, 22-kDA heat shock protein, 33-kDa Oxygen-evolving enhancer protein 1, ATP synthase γ subunit, ATP synthase δ subunit, chlorophyll-a/b-binding proteinII-1, Oxygen-evolving enhancer protein 2, Oxygen-evolving enhancer protein 3, photosystem I: P21, photosystem I: P28, photosystem I: P30, photosystem I: P35, photosystem I: P37, glycerol-3-phosphate acyltransferases, chlorophyll a/b binding protein, CAB2 protein, hydroxymethyl-bilane synthase, pyruvate-orthophosphate dikinase, CAB3 protein, plastid ferritin, ferritin, early light-inducible protein, glutamate-1-semialdehyde aminotransferase, protochlorophyllide reductase, starch-granule-bound amylase synthase, light-harvesting chlorophyll a/b-binding protein of photosystem II, major pollen allergen Lol p 5a, plastid ClpB ATP-dependent protease, superoxide dismutase, ferredoxin NADP oxidoreductase, 28-kDa ribonucleoprotein, 31-kDa ribonucleoprotein, 33-kDa ribonucleoprotein, acetolactate synthase, ATP synthase CF₀ subunit 1, ATP synthase CF₀ subunit 2, ATP synthase CF₀ subunit 3, ATP synthase CF₀ subunit 4, cytochrome f, ADP-glucose pyrophosphorylase, glutamine synthase, glutamine synthase 2, carbonic anhydrase, GapA protein, heat-shock-protein hsp21, phosphate translocator, plastid ClpA ATP-dependent protease, plastid ribosomal protein CL24, plastid ribosomal protein CL9, plastid ribosomal protein PsCL18, plastid ribosomal protein PsCL25, DAHP synthase, starch phosphorylase, root acyl carrier protein II, betaine-aldehyde dehydrogenase, GapB protein, glutamine synthetase 2, phosphoribulokinase, nitrite reductase, ribosomal protein L12, ribosomal protein L13, ribosomal protein L21, ribosomal protein L35, ribosomal protein L40, triose phosphate-3-phosphoglyerate-phosphate translocator, ferredoxin-dependent glutamate synthase, glyceraldehyde-3-phosphate dehydrogenase, NADP-dependent malic enzyme and NADP-malate dehydrogenase. The plastome sequences are preferential derived from the plastome of the target organisms themselves and are advantageously derived from one of the following intergration sites: trnV-rps12/7 (Skidar et al., Plant Cell Rep. 1998, 18: 20-24 and other reports), rbvL-aacD (Svab et al. 1993, Proc. Natl. Acad. Sci. USA 90: 913-917), trnI-trnA (De Cosa et al., 2001, Nat. Biotech. 19, 71-74) rps7-ndhB (Hou et al., 2003, Transgenic Res. 12, 111-114) or ndhF-trnL site Zhang et al., 2001c, Plant Physiol. 127, 131-141).

[0750] The nucleic acid sequences used in the process are advantageously introduced in a nucleic acid construct, preferably an expression cassette, which makes possible the expression of the nucleic acid molecules in an organism, advantageously a plant or a microorganism such as an algae, advantageously in the plastids of those organisms.

[0751] In principle, the nucleic acid construct can comprise the herein described regulator sequences and further sequences relevant for the expression of the comprised genes. Thus, the nucleic acid construct of the invention can be used as expression cassette and thus can be used directly for introduction into the plant, or else they may be introduced into a vector. Accordingly in one embodiment the nucleic acid construct is an expression cassette comprising a microorganism promoter or a microorganism terminator or both. In another embodiment the expression cassette encompasses a plant promoter or a plant terminator or both. In another embodiment the expression cassette encompasses sequences for transcription by plastid RNA polymerases.

[0752] Accordingly, in one embodiment, the process according to the invention comprises the following steps:
[0753] (a) introducing of a nucleic acid construct comprising the nucleic acid molecule of the invention or used in the process of the invention or encoding the polypeptide of the present invention or used in the process of the invention; or
[0754] (b) introducing of a nucleic acid molecule, including regulatory sequences or factors, which expression increases the expression of the nucleic acid molecule of the invention or used in the process of the invention or encoding the polypeptide of the present invention or used in the process of the invention;
[0755] in a cell, or an organism or a part thereof, preferably in a plant, plant cell or a microorganism preferably in the organelles such as the plastids thereof, and
[0756] (c) expressing of the gene product encoded by the nucleic acid construct or the nucleic acid molecule mentioned under (a) or (b) in the cell or the organism or part thereof.

[0757] In one embodiment of the invention, plant expression vectors encompass those which are described in the figures: FIG. 3 and/or FIG. 4.

### EXAMPLE 1

### Cloning of the Inventive Sequences According to the SEQ ID NO: 1, 327, 987 or 1156 for the Expression in Plants

[0758] Unless otherwise specified, standard methods as described in Sambrook et al., Molecular Cloning: A laboratory manual, Cold Spring Harbor 1989, Cold Spring Harbor Laboratory Press are used.

[0759] The inventive sequences were amplified by PCR as described in the protocol of the Pfu Turbo or Herculase DNA polymerase (Stratagene).

[0760] The composition for the protocol of the Pfu Turbo or Herculase DNA polymerase was as follows: 1×PCR buffer (Stratagene), 0.2 mM of each dNTP, 100 ng genomic DNA of Saccharomyces cerevisiae (strain S288C; Research Genetics, Inc., now Invitrogen) or Escherichia coli (strain MG1655; E. coli Genetic Stock Center), 50 pmol forward primer, 50 pmol reverse primer, 2.5 u Pfu Turbo or Herculase DNA polymerase. The amplification cycles were as follows:

[0761] Saccharomyces cerevisiae: 1 cycle of 3 minutes at 94-95° C., followed by 25-36 cycles of in each case 1 minute at 95° C. or 30 seconds at 94° C., 45 seconds at 50° C., 30 seconds at 50° C. or 30 seconds at 55° C. and 210-480 seconds at 72° C., followed by 1 cycle of 8 minutes at 72° C., then 4° C.

[0762] Escherichia coli: 1 cycle of 2-3 minutes at 94° C., followed by 25-30 cycles of in each case 30 seconds at 94° C., 30 seconds at 55-60° C. and 5-10 minutes at 72° C., followed by 1 cycle of 10 minutes at 72° C., then 4° C.

[0763] The following adapter sequences were added to Saccharomyces cerevisiae ORF specific primers (see table IV) for cloning purposes:

SEQ ID NO: 985

i) forward primer: 5′-GGAATTCCAGCTGACCACC-3′

SEQ ID NO: 986

ii) reverse primer: 5′-GATCCCCGGGAATTGCCATG-3′

[0764] The following adapter sequences were added to Escherichia coli ORF specific primers for cloning purposes:

SEQ ID NO: 979

iii) forward primer: 5′-TTGCTCTTCC-3′

SEQ ID NO: 980

iiii) reverse primer: 5′-TTGCTCTTCG-3′

[0765] Therefore for amplification and cloning of Saccharomyces cerevisiae SEQ ID NO: 327, a primer consisting of the adaptor sequence i) and the ORF specific sequence SEQ ID NO: 675 and a second primer consisting of the adaptor sequence ii) and the ORF specific sequence SEQ ID NO: 676 were used. For amplification and cloning of Echerichia coli SEQ ID NO: 1, a primer consisting of the adaptor sequence iii) and the ORF specific sequence SEQ ID NO: 317 and a second primer consisting of the adaptor sequence iiii) and the ORF specific sequence SEQ ID NO: 318 were used.

[0766] For amplification and cloning of Saccharomyces cerevisiae SEQ ID NO: 987, a primer consisting of the adaptor sequence i) and the ORF specific sequence SEQ ID NO: 1147, as indicated in table III, column 7, line 4 and a second primer consisting of the adaptor sequence ii) and the ORF specific sequence SEQ ID NO: 1148 as indicated in table III, column 7, line 4 were used.

[0767] For amplification and cloning of Saccharomyces cerevisiae SEQ ID NO: 1156, a primer consisting of the adaptor sequence i) and the ORF specific sequence SEQ ID NO: 1184, as indicated in table III, column 7, line 5 and a second primer consisting of the adaptor sequence ii) and the ORF specific sequence SEQ ID NO: 1185 as indicated in table III, column 7, line 5 were used.

[0768] Construction of binary vectors for targeting of expressed proteins to the plastids.

[0769] For constitutive expression the binary vectors used for cloning the targeting sequence were 1bxSuperResgen SEQ ID NO: 958, and 1bxSuperColi SEQ ID NO: 957. For strong expression in seeds the binary vectors used for cloning the targeting sequence, were 1bxUSPResgen SEQ ID NO: 1194 (FIG. 3), and 1bxUSPColi SEQ ID NO: 1195 (FIG. 4), containing the USP promotor (Baeumlein et al., Mol Gen Genet, 1991, 225 (3):459-67). Other useful binary vectors are known to the skilled worker; an overview of binary vectors and their use can be found in Hellens, R., Mullineaux, P. and Klee H., [(2000) “A guide to Agrobacterium binary vectors”, Trends in Plant Science, Vol. 5 No. 10, 446-451. Such vectors have to be equally equipped with appropriate promoters and targeting sequences.

[0770] Amplification of the targeting sequence of the gene FNR from Spinacia oleracea

[0771] In order to amplify the targeting sequence of the FNR gene from S. oleracea, genomic DNA was extracted from leaves of 4 weeks old S. oleracea plants (DNeasy Plant Mini Kit, Qiagen, Hilden). The gDNA was used as the template for a PCR.

[0772] To enable cloning of the transit sequence into the vector 1bxSuperResgen an EcoRI restriction enzyme recognition sequence was added to both the forward and reverse primers, whereas for cloning in the vectors 1bxSuperColi a PmeI restriction enzyme recognition sequence was added to the forward primer and a NcoI site was added to the reverse primer.

FNR5EcoResgen

SEQ ID NO: 983

ATA gAA TTC gCA TAA ACT TAT CTT CAT AgT TgC C
FNR3EcoResgen

SEQ ID NO: 981

ATA gAA TTC AgA ggC gAT CTg ggC CCT
FNR5PmeColic

SEQ ID NO: 984

ATA gTT TAA ACg CAT AAA CTT ATC TTC ATA gTT gCC
FNR3NcoColic

SEQ ID NO: 982

ATA CCA Tgg AAg AgC AAg Agg CgA TCT ggg CCC T

[0773] The sequence amplified from spinach, SEQ ID NO: 959 comprised a 5′UTR (bp1-166), and the coding region (bp 167-275 and 353-419). The coding sequence is interrupted by an intronic sequence from bp 276 to-bp 352.

Gcataaacttatcttcatagttgccactccaatttgctccttgaatctcc
tccacccaatacataatccactcctccatcacccacttcactactaaatc
aaacttaactctgtttttctctctcctcctttcatttcttattcttccaa
tcatcgtactccgccatgaccaccgctgtcaccgccgctgtttctttccc
ctctaccaaaaccacctctctctccgcccgaagctcctccgtcatttccc
ctgacaaaatcagctacaaaaaggtgattcccaatttcactgtgtttttt
attaataatttgttattttgatgatgagatgattaatttgggtgctgcag
gttcctttgtactacaggaatgtatctgcaactgggaaaatgggacccat
cagggcccagatcgcctct

[0774] The PCR fragment derived with the primers FNR5EcoResgen and FNR3EcoResgen was digested with EcoRI and ligated in the vector 1bxSuperResgen SEQ ID NO: 958 or 1bxUSPResgen SEQ ID NO: 1194 that had also been digested with EcoRI. The correct orientation of the FNR targeting sequence was tested by sequencing. The vector generated in this ligation step was 1bxSuperTPFNRResgen or 1bxUSPTPFNRResgen respectively.

[0775] The PCR fragment derived with the primers FNR5PmeColic and FNR3NcoColic was digested with PmeI and NcoI and ligated in the vector 1bxSuperColic SEQ ID NO: 957, or 1bxUSPColic SEQ NO: 1195 that had been digested with SmaI and NcoI. The vector generated in this ligation step was 1bxSuperTPFNRColic or 1bxUSPTPFNRColic respectively.

[0776] For cloning the ORF of SEQ ID NO: 327, 987 or 1156 respectively from S. cerevisiae the vector DNA was treated with the restriction enzyme NcoI. For cloning of ORFs from E. coli, e.g. SEQ ID NO: 1, the vector DNA was treated with the restriction enzymes PacI and NcoI following the standard protocol (MBI Fermentas). The reaction was stopped by inactivation at 70° C. for 20 minutes and purified over QIAquick columns following the standard protocol (Qiagen).

[0777] Then the PCR-product representing the amplified ORF and the vector DNA were treated with T4 DNA polymerase according to the standard protocol (MBI Fermentas) to produce single stranded overhangs with the parameters 1 unit T4 DNA polymerase at 37° C. for 2-10 minutes for the vector and 1 u T4 DNA polymerase at 15° C. for 10-60 minutes.

[0778] The reactions were stopped by addition of high-salt buffer and purified over QIAquick columns following the standard protocol (Qiagen).

[0779] Approximately 30 ng of prepared vector and a defined amount of prepared amplificate were mixed and hybridized at 65° C. for 15 minutes followed by 37° C. 0.1° C./1 seconds, followed by 37° C. 10 minutes, followed by 0.1° C./1 seconds, then 4° C.

[0780] The ligated constructs were transformed in the same reaction vessel by addition of competent E. coli cells (strain DH5alpha) and incubation for 20 minutes at 1° C. followed by a heat shock for 90 seconds at 42° C. and cooling to 4° C. Then, complete medium (SOC) was added and the mixture was incubated for 45 minutes at 37° C. The entire mixture was subsequently plated onto an agar plate with 0.05 mg/ml kanamycine and incubated overnight at 37° C.

[0781] The outcome of the cloning step was verified by amplification with the aid of primers which bind upstream and downstream of the integration site, thus allowing the amplification of the insertion. The amplifications were carried as described in the protocol of Taq DNA polymerase (Gibco-BRL).

[0782] The amplification cycles were as follows: 1 cycle of 5 minutes at 94° C., followed by 35 cycles of in each case 15 seconds at 94° C., 15 seconds at 50-66° C. and 5 minutes at 72° C., followed by 1 cycle of 10 minutes at 72° C., then 4° C.

[0783] Several colonies were checked, but only one colony for which a PCR product of the expected size was detected was used in the following steps.

[0784] A portion of this positive colony was transferred into a reaction vessel filled with complete medium (LB) supplemented with kanamycin (50 μg/ml) and incubated overnight at 37° C.

[0785] The plasmid preparation was carried out as specified in the Qiaprep standard protocol (Qiagen).

### EXAMPLE 2

### Generation of Transgenic Plants Which Express SEQ ID NO: 1 or SEQ ID NO: 327, or SEQ ID NO: 987 or SEQ ID NO: 1156 Respectively

[0786] 1-5 ng of the plasmid DNA isolated was transformed by electroporation into competent cells of Agrobacterium tumefaciens, of strain GV 3101 pMP90 (Koncz and Schell, Mol. Gen. Gent. 204, 383-396, 1986). Thereafter, complete medium (YEP) was added and the mixture was transferred into a fresh reaction vessel for 3 hours at 28° C. Thereafter, all of the reaction mixture was plated onto YEP agar plates supplemented with the respective antibiotics, e.g. rifampicine (0.1 mg/ml), gentamycine (0.025 mg/ml and kanamycine (0.05 mg/ml) and incubated for 48 hours at 28° C.

[0787] The agrobacteria that contains the plasmid construct were then used for the transformation of plants.

[0788] A colony was picked from the agar plate with the aid of a pipette tip and taken up in 3 ml of liquid TB medium, which also contained suitable antibiotics as described above. The preculture was grown for 48 hours at 28° C. and 120 rpm.

[0789] 400 ml of LB medium containing the same antibiotics as above were used for the main culture. The preculture was transferred into the main culture. It was grown for 18 hours at 28° C. and 120 rpm. After centrifugation at 4 000 rpm, the pellet was resuspended in infiltration medium (MS medium, 10% sucrose).

[0790] In order to grow the plants for the transformation, dishes (Piki Saat 80, green, provided with a screen bottom, 30×20×4.5 cm, from Wiesauplast, Kunststofftechnik, Germany) were half-filled with a GS 90 substrate (standard soil, Werkverband E.V., Germany). The dishes were watered overnight with 0.05% Proplant solution (Chimac-Apriphar, Belgium). Arabidopsis thaliana C24 seeds (Nottingham Arabidopsis Stock Centre, UK; NASC Stock N906) were scattered over the dish, approximately 1 000 seeds per dish. The dishes were covered with a hood and placed in the stratification facility (8 h, 110 μmol/m²/s⁻¹, 22° C.; 16 h, dark, 6° C.). After 5 days, the dishes were placed into the short-day controlled environment chamber (8 h 130 μmol/m²/s¹, 22° C.; 16 h, dark 20° C.), where they remained for approximately 10 days until the first true leaves had formed.

[0791] The seedlings were transferred into pots containing the same substrate (Teku pots, 7 cm, LC series, manufactured by Pöppelmann GmbH & Co, Germany). Five plants were pricked out into each pot. The pots were then returned into the short-day controlled environment chamber for the plant to continue growing.

[0792] After 10 days, the plants were transferred into the greenhouse cabinet (supplementary illumination, 16 h, 340 μE, 22° C.; 8 h, dark, 20° C.), where they were allowed to grow for further 17 days.

[0793] For the transformation, 6-week-old Arabidopsis plants, which had just started flowering were immersed for 10 seconds into the above-described agrobacterial suspension which had previously been treated with 10 I Silwett L77 (Crompton S. A., Osi Specialties, Switzerland). The method in question is described in Clough and Bent, 1998 (Clough, J C and Bent, A F. 1998 Floral dip: a simplified method for Agrobacterium-mediated transformation of Arabidopsis thaliana, Plant J. 16:735-743.

[0794] The plants were subsequently placed for 18 hours into a humid chamber. Thereafter, the pots were returned to the greenhouse for the plants to continue growing. The plants remained in the greenhouse for another 10 weeks until the seeds were ready for harvesting.

[0795] Depending on the resistance marker used for the selection of the transformed plants the harvested seeds were planted in the greenhouse and subjected to a spray selection or else first sterilized and then grown on agar plates supplemented with the respective selection agent. Since the vector contained the bar gene as the resistance marker, plantlets were sprayed four times at an interval of 2 to 3 days with 0.02% BASTA® and transformed plants were allowed to set seeds. The seeds of the transgenic A. thaliana plants were stored in the freezer (at −20° C.).

[0796] The plants were subsequently placed for 18 hours into a humid chamber. Thereafter, the pots were returned to the greenhouse for the plants to continue growing. The plants remained in the greenhouse for another 10 weeks until the seeds were ready for harvesting.

### EXAMPLE 3

### Nitrogen Content Analysis

[0797] The determination of nitrogen in the samples is performed using the Dumas method which relies on the complete combustion of the test material. The sample is heated in a high temperature furnace and rapidly combusted in the presence of pure oxygen. The combustion products (mainly CO2, H2O, NOx, and N2) are collected and allowed to equilibrate. An aliquot of the gas mixture is passed over hot copper to remove any oxygen and convert NO2 to N2. The sample is then passed through a trap that removes CO2 and H2O. The remaining nitrogen is measured by a thermal conductivity detector.

[0798] For the analysis of leaf material or for seed kernels, homogenized freeze-dryed material is used. In the case of Arabidopsis seeds, the seeds are analyzed directly without pretreatment.

[0799] 4-7 mg of the sample were weighed into a tin foil cup together with 15 mg of tungsten(VI)-oxide (WO3). Analysis was performed using a commercial elementar analyzer (e.g. ELEMENTAR vario EL III, ELEMENTAR, Hanau, Germany).

[0800] Table VII shows the increased total nitrogen content of seeds from transgenic plants expressing the Escherichia coli ORF yeast ORF b1852, corresponding to Seq ID NO: 1 or the Saccharomyces cerevisiae ORF YNL241c, corresponding to SEQ ID NO: 327, or the Saccharomyces cerevisiae ORF YJL167W, corresponding SEQ ID NO: 987 or or the Saccharomyces cerevisiae ORF YML054C, corresponding SEQ ID NO: 1156 respectively in the plastidial compartment under control of the USP promotor as described above. Column 1 shows the analysed ORF expressed in the plastidial compartment, column 2 shows the measured element, column 3 shows the wild type variability as “relative standard deviation”, column 4 shows the mean change in the element content for different transgenic lines transformed with SEQ ID NO: 1 or SEQ ID NO: 327, or SEQ ID NO: 987 or SEQ ID NO: 1156 respectively relative to the wildtype control which is standardized as “1”, column 5 shows the standard deviation for the different transgenic lines and column 6 shows the maximal observed change. As expected, the relative increase in nitrogen corresponds to a relative decrease in carbon content.

| | | | Mean, | | |
|---|---|---|---|---|---|
| | | WT | relative to | | |
| | | variability | wildtype | | Max. |
| ORF | Parameter | (RSD; %) | control | SD | Change |
| b1852 | % N | 0.05 | 1.06 | 0.08 | 1.13 |
| b1852 | % C | 0.01 | 1.01 | 0.01 | 0.99 |
| YNL241C | % N | 0.05 | 1.09 | 0.04 | 1.12 |
| YNL241C | % C | 0.01 | 0.96 | 0.02 | 0.94 |
| YJL167W | % N | na | 1.08 | 0.1 | 1.26 |
| YJL167W | % C | na | 0.96 | 0.37 | 0.89 |
| YML054C | % N | na | 1.06 | 0.06 | 1.15 |
| YML054C | % C | na | 0.99 | 0.02 | 0.95 |

### EXAMPLE 4

### Enhanced Nitrogen Use Efficiency

[0801] In order to test enhanced nitrogen use efficiency of the transgenic lines, plants were grown under nitrogen limited conditions:

[0802] Transgenic lines expressing the Escherichia coli ORF yeast ORF b1852, corresponding to Seq ID NO: 1 or Saccharomyces cerevisiae ORF YNL241c, corresponding to SEQ ID NO: 327 or the Saccharomyces cerevisiae ORF YJL167W, corresponding SEQ ID NO: 987 or or the Saccharomyces cerevisiae ORF YML054C, corresponding SEQ ID NO: 1156 respectively in the plastidal compartment, showed enhanced growth under nitrogen limited conditions and less symptoms of nitrogen deficiency (bleaching, retarded growth, senescence) in comparison to wilde type control plants.

TABLE I A
Nucleic acid sequence ID numbers

| | | | 3. | | 5. | | |
|---|---|---|---|---|---|---|---|
| | 1. | 2. | Gene/ORF | | Lead | | |
| Application | Hit | Project | Locus | 4. | NA | 6. | 7. |
| no. | no. | no.: | Name | Organism | SEQ ID | Metabolite | Homologs NA SEQ IDs |
| 1 | 1 | OEX_N- | YPR138C | Saccharomyces | 689 | n/a | 691, 693, 695, 697, 699, 701, 703, 705, |
| | | Hits | | cerevisiae | | | 707, 709, 711, 713, 715, 717, 719, 721, |
| | | | | | | | 723, 725, 727, 729, 731, 733, 735, 737, |
| | | | | | | | 739, 741, 743, 745, 747, 749, 751, 753, |
| | | | | | | | 755, 757, 759, 761, 763, 765, 767, 769, |
| | | | | | | | 771, 773, 775, 777, 779, 781, 783, 785, |
| | | | | | | | 787, 789, 791, 793, 795, 797, 799, 801, |
| | | | | | | | 803, 805, 807, 809, 811, 813, 815, 817, |
| | | | | | | | 819, 821, 823, 825, 827, 829, 831, 833, |
| | | | | | | | 835, 837, 839, 841, 843, 845, 847, 849, |
| | | | | | | | 851, 853, 855, 857, 859, 861, 863, 865, |
| | | | | | | | 867, 869, 871, 873, 875, 877, 879, 881, |
| | | | | | | | 883, 885, 887, 889, 891, 893, 895, 897, |
| | | | | | | | 899, 901, 903, 905, 907, 909, 911, 913, |
| | | | | | | | 915, 917, 919, 921, 923, 925, 927, 929, |
| | | | | | | | 931, 933, 935, 937, 939, 941, 943, 945, |
| | | | | | | | 947 |
| 2 | 2 | OEX_N- | b1852 | Escherichia coli | 1 | n/a | 3, 5, 7, 9, 11, 13, 15, 17, 19, 21, 23, 25, |
| | | Hits | | K12 | | | 27, 29, 31, 33, 35, 37, 39, 41, 43, 45, |
| | | | | | | | 47, 49, 51, 53, 55, 57, 59, 61, 63, 65, |
| | | | | | | | 67, 69, 71, 73, 75, 77, 79, 81, 83, 85, |
| | | | | | | | 87, 89, 91, 93, 95, 97, 99, 101, 103, |
| | | | | | | | 105, 107, 109, 111, 113, 115, 117, 119, |
| | | | | | | | 121, 123, 125, 127, 129, 131, 133, 135, |
| | | | | | | | 137, 139, 141, 143, 145, 147, 149, 151, |
| | | | | | | | 153, 155, 157, 159, 161, 163, 165, 167, |
| | | | | | | | 169, 171, 173, 175, 177, 179, 181, 183, |
| | | | | | | | 185, 187, 189, 191, 193, 195, 197, 199, |
| | | | | | | | 201, 203, 205, 207, 209, 211, 213, 215, |
| | | | | | | | 217, 219, 221, 223, 225, 227, 229, 231, |
| | | | | | | | 233, 235, 237, 239, 241, 243, 245, 247, |
| | | | | | | | 249, 251, 253, 255, 257, 259, 261, 263, |
| | | | | | | | 265, 267, 269, 271, 273, 275, 277, 279, |
| | | | | | | | 281, 283, 285, 287, 289, 291, 293, 295, |
| | | | | | | | 297, 299, 301, 303, 305, 307, 309, 311, |
| | | | | | | | 313, 315 |
| 2 | 3 | OEX_N- | YNL241C | Saccharomyces | 327 | n/a | 329, 331, 333, 335, 337, 339, 341, 343, |
| | | Hits | | cerevisiae | | | 345, 347, 349, 351, 353, 355, 357, 359, |
| | | | | | | | 361, 363, 365, 367, 369, 371, 373, 375, |
| | | | | | | | 377, 379, 381, 383, 385, 387, 389, 391, |
| | | | | | | | 393, 395, 397, 399, 401, 403, 405, 407, |
| | | | | | | | 409, 411, 413, 415, 417, 419, 421, 423, |
| | | | | | | | 425, 427, 429, 431, 433, 435, 437, 439, |
| | | | | | | | 441, 443, 445, 447, 449, 451, 453, 455, |
| | | | | | | | 457, 459, 461, 463, 465, 467, 469, 471, |
| | | | | | | | 473, 475, 477, 479, 481, 483, 485, 487, |
| | | | | | | | 489, 491, 493, 495, 497, 499, 501, 503, |
| | | | | | | | 505, 507, 509, 511, 513, 515, 517, 519, |
| | | | | | | | 521, 523, 525, 527, 529, 531, 533, 535, |
| | | | | | | | 537, 539, 541, 543, 545, 547, 549, 551, |
| | | | | | | | 553, 555, 557, 559, 561, 563, 565, 567, |
| | | | | | | | 569, 571, 573, 575, 577, 579, 581, 583, |
| | | | | | | | 585, 587, 589, 591, 593, 595, 597, 599, |
| | | | | | | | 601, 603, 605, 607, 609, 611, 613, 615, |
| | | | | | | | 617, 619, 621, 623, 625, 627, 629, 631, |
| | | | | | | | 633, 635, 637, 639, 641, 643, 645, 647, |
| | | | | | | | 649, 651, 653, 655, 657, 659, 661, 663, |
| | | | | | | | 665, 667, 669, 671, 673 |
| 3 | 4 | OEX_N- | Yjl167w | Saccharomyces | 987 | n/a | 989, 991, 993, 995, 997, 999, 1001, 1003, |
| | | Hits | | cerevisiae | | | 1005, 1007, 1009, 1011, 1013, 1015, 1017, |
| | | | | | | | 1019, 1021, 1023, 1025, 1027, 1029, 1031, |
| | | | | | | | 1033, 1035, 1037, 1039, 1041, 1043, 1045, |
| | | | | | | | 1047, 1049, 1051, 1053, 1055, 1057, 1059, |
| | | | | | | | 1061, 1063, 1065, 1067, 1069, 1071, 1073, |
| | | | | | | | 1075, 1077, 1079, 1081, 1083, 1085, 1087, |
| | | | | | | | 1089, 1091, 1093, 1095, 1097, 1099, 1101, |
| | | | | | | | 1103, 1105, 1107, 1109, 1111, 1113, 1115, |
| | | | | | | | 1117, 1119, 1121, 1123, 1125, 1127, 1129, |
| | | | | | | | 1131, 1133, 1135, 1137 |
| 3 | 5 | OEX_N- | Yml054c | Saccharomyces | 1156 | n/a | 1158, 1160, 1162, 1164, 1166, 1168, 1170, |
| | | Hits | | cerevisiae | | | 1172, 1174, 1176, 1178, 1180, 1182 |

TABLE I B
Nucleic acid sequence ID numbers

| | | | 3. | | 5. | | |
|---|---|---|---|---|---|---|---|
| | 1. | 2. | Gene/ORF | | Lead | | |
| Application | Hit | Project | Locus | 4. | NA | 6. | 7. |
| no. | no. | no.: | Name | Organism | SEQ ID | Metabolite | Homologs NA SEQ IDs |
| 1 | 1 | OEX_N- | YPR138C | Saccharomyces | 689 | n/a | 955 |
| | | Hits | | cerevisiae | | | |
| 2 | 2 | OEX_N- | b1852 | Escherichia coli | 1 | n/a | 323, 325 |
| | | Hits | | K12 | | | |
| 2 | 3 | OEX_N- | YNL241C | Saccharomyces | 327 | n/a | 681, 683, 685, 687 |
| | | Hits | | cerevisiae | | | |
| 3 | 4 | OEX_N- | Yjl167w | Saccharomyces | 987 | n/a | 1139, 1141, 1143, 1145 |
| | | Hits | | cerevisiae | | | |
| 3 | 5 | OEX_N- | Yml054c | Saccharomyces | 1156 | n/a | — |
| | | Hits | | cerevisiae | | | |

TABLE II A
Amino acid sequence ID numbers

| | | | 3. | | 5. | | |
|---|---|---|---|---|---|---|---|
| | 1. | 2. | Gene/ORF | | Lead | | |
| Application | Hit | Project | Locus | 4. | AA | 6. | 7. |
| no. | no. | no.: | Name | Organism | SEQ ID | Metabolite | Homologs AA SEQ IDs |
| 1 | 1 | OEX_N- | YPR138C | Saccharomyces | 690 | n/a | 692, 694, 696, 698, 700, 702, 704, |
| | | Hits | | cerevisiae | | | 706, 708, 710, 712, 714, 716, 718, |
| | | | | | | | 720, 722, 724, 726, 728, 730, 732, |
| | | | | | | | 734, 736, 738, 740, 742, 744, 746, |
| | | | | | | | 748, 750, 752, 754, 756, 758, 760, |
| | | | | | | | 762, 764, 766, 768, 770, 772, 774, |
| | | | | | | | 776, 778, 780, 782, 784, 786, 788, |
| | | | | | | | 790, 792, 794, 796, 798, 800, 802, |
| | | | | | | | 804, 806, 808, 810, 812, 814, 816, |
| | | | | | | | 818, 820, 822, 824, 826, 828, 830, |
| | | | | | | | 832, 834, 836, 838, 840, 842, 844, |
| | | | | | | | 846, 848, 850, 852, 854, 856, 858, |
| | | | | | | | 860, 862, 864, 866, 868, 870, 872, |
| | | | | | | | 874, 876, 878, 880, 882, 884, 886, |
| | | | | | | | 888, 890, 892, 894, 896, 898, 900, |
| | | | | | | | 902, 904, 906, 908, 910, 912, 914, |
| | | | | | | | 916, 918, 920, 922, 924, 926, 928, |
| | | | | | | | 930, 932, 934, 936, 938, 940, 942, |
| | | | | | | | 944, 946, 948 |
| 2 | 2 | OEX_N- | b1852 | Escherichia coli | 2 | n/a | 4, 6, 8, 10, 12, 14, 16, 18, 20, 22, 24, |
| | | Hits | | K12 | | | 26, 28, 30, 32, 34, 36, 38, 40, 42, 44, |
| | | | | | | | 46, 48, 50, 52, 54, 56, 58, 60, 62, 64, |
| | | | | | | | 66, 68, 70, 72, 74, 76, 78, 80, 82, 84, |
| | | | | | | | 86, 88, 90, 92, 94, 96, 98, 100, 102, |
| | | | | | | | 104, 106, 108, 110, 112, 114, 116, |
| | | | | | | | 118, 120, 122, 124, 126, 128, 130, |
| | | | | | | | 132, 134, 136, 138, 140, 142, 144, |
| | | | | | | | 146, 148, 150, 152, 154, 156, 158, |
| | | | | | | | 160, 162, 164, 166, 168, 170, 172, |
| | | | | | | | 174, 176, 178, 180, 182, 184, 186, |
| | | | | | | | 188, 190, 192, 194, 196, 198, 200, |
| | | | | | | | 202, 204, 206, 208, 210, 212, 214, |
| | | | | | | | 216, 218, 220, 222, 224, 226, 228, |
| | | | | | | | 230, 232, 234, 236, 238, 240, 242, |
| | | | | | | | 244, 246, 248, 250, 252, 254, 256, |
| | | | | | | | 258, 260, 262, 264, 266, 268, 270, |
| | | | | | | | 272, 274, 276, 278, 280, 282, 284, |
| | | | | | | | 286, 288, 290, 292, 294, 296, 298, |
| | | | | | | | 300, 302, 304, 306, 308, 310, 312, |
| | | | | | | | 314, 316 |
| 2 | 3 | OEX_N- | YNL241C | Saccharomyces | 328 | n/a | 330, 332, 334, 336, 338, 340, 342, |
| | | Hits | | cerevisiae | | | 344, 346, 348, 350, 352, 354, 356, |
| | | | | | | | 358, 360, 362, 364, 366, 368, 370, |
| | | | | | | | 372, 374, 376, 378, 380, 382, 384, |
| | | | | | | | 386, 388, 390, 392, 394, 396, 398, |
| | | | | | | | 400, 402, 404, 406, 408, 410, 412, |
| | | | | | | | 414, 416, 418, 420, 422, 424, 426, |
| | | | | | | | 428, 430, 432, 434, 436, 438, 440, |
| | | | | | | | 442, 444, 446, 448, 450, 452, 454, |
| | | | | | | | 456, 458, 460, 462, 464, 466, 468, |
| | | | | | | | 470, 472, 474, 476, 478, 480, 482, |
| | | | | | | | 484, 486, 488, 490, 492, 494, 496, |
| | | | | | | | 498, 500, 502, 504, 506, 508, 510, |
| | | | | | | | 512, 514, 516, 518, 520, 522, 524, |
| | | | | | | | 526, 528, 530, 532, 534, 536, 538, |
| | | | | | | | 540, 542, 544, 546, 548, 550, 552, |
| | | | | | | | 554, 556, 558, 560, 562, 564, 566, |
| | | | | | | | 568, 570, 572, 574, 576, 578, 580, |
| | | | | | | | 582, 584, 586, 588, 590, 592, 594, |
| | | | | | | | 596, 598, 600, 602, 604, 606, 608, |
| | | | | | | | 610, 612, 614, 616, 618, 620, 622, |
| | | | | | | | 624, 626, 628, 630, 632, 634, 636, |
| | | | | | | | 638, 640, 642, 644, 646, 648, 650, |
| | | | | | | | 652, 654, 656, 658, 660, 662, 664, |
| | | | | | | | 666, 668, 670, 672, 674 |
| 3 | 4 | OEX_N- | Yjl167w | Saccharomyces | 988 | n/a | 990, 992, 994, 996, 998, 1000, 1002, |
| | | Hits | | cerevisiae | | | 1004, 1006, 1008, 1010, 1012, 1014, |
| | | | | | | | 1016, 1018, 1020, 1022, 1024, 1026, |
| | | | | | | | 1028, 1030, 1032, 1034, 1036, 1038, |
| | | | | | | | 1040, 1042, 1044, 1046, 1048, 1050, |
| | | | | | | | 1052, 1054, 1056, 1058, 1060, 1062, |
| | | | | | | | 1064, 1066, 1068, 1070, 1072, 1074, |
| | | | | | | | 1076, 1078, 1080, 1082, 1084, 1086, |
| | | | | | | | 1088, 1090, 1092, 1094, 1096, 1098, |
| | | | | | | | 1100, 1102, 1104, 1106, 1108, 1110, |
| | | | | | | | 1112, 1114, 1116, 1118, 1120, 1122, |
| | | | | | | | 1124, 1126, 1128, 1130, 1132, 1134, |
| | | | | | | | 1136, 1138 |
| 3 | 5 | OEX_N- | Yml054c | Saccharomyces | 1157 | n/a | 1159, 1161, 1163, 1165, 1167, 1169, |
| | | Hits | | cerevisiae | | | 1171, 1173, 1175, 1177, 1179, 1181, |
| | | | | | | | 1183 |

TABLE II B
Amino acid sequence ID numbers

| | | | 3. | | 5. | | |
|---|---|---|---|---|---|---|---|
| | 1. | 2. | Gene/ORF | | Lead | | |
| Application | Hit | Project | Locus | 4. | AA | 6. | 7. |
| no | no. | no.: | Name | Organism | SEQ ID | Metabolite | Homologs AA SEQ IDs |
| 1 | 1 | OEX_N- | YPR138C | Saccharomyces | 690 | n/a | 956 |
| | | Hits | | cerevisiae | | | |
| 2 | 2 | OEX_N- | b1852 | Escherichia coli | 2 | n/a | 324, 326 |
| | | Hits | | K12 | | | |
| 2 | 3 | OEX_N- | YNL241C | Saccharomyces | 328 | n/a | 682, 684, 686, 688 |
| | | Hits | | cerevisiae | | | |
| 3 | 4 | OEX_N- | Yjl167w | Saccharomyces | 988 | n/a | 1140, 1142, 1144, 1146 |
| | | Hits | | cerevisiae | | | |
| 3 | 5 | OEX_N- | Yml054c | Saccharomyces | 1157 | n/a | — |
| | | Hits | | cerevisiae | | | |

TABLE III
Primer nucleic acid sequence ID numbers

| | | | 3. | | 5. | | |
|---|---|---|---|---|---|---|---|
| | 1. | 2. | Gene/ORF | | Lead | | |
| Application | Hit | Project | Locus | 4. | NA | 6. | 7. |
| no | no. | no.: | Name | Organism | SEQ ID | Metabolite | Primer NA SEQ IDs |
| 1 | 1 | OEX_N- | YPR138C | Saccharomyces | 689 | n/a | 949, 950 |
| | | Hits | | cerevisiae | | | |
| 2 | 2 | OEX_N- | b1852 | Escherichia coli | 1 | n/a | 317, 318 |
| | | Hits | | K12 | | | |
| 2 | 3 | OEX_N- | YNL241C | Saccharomyces | 327 | n/a | 675, 676 |
| | | Hits | | cerevisiae | | | |
| 3 | 4 | OEX_N- | Yjl167w | Saccharomyces | 987 | n/a | 1147, 1148 |
| | | Hits | | cerevisiae | | | |
| 3 | 5 | OEX_N- | Yml054c | Saccharomyces | 1156 | n/a | 1184, 1185 |
| | | Hits | | cerevisiae | | | |

TABLE IV
Consensus nucleic acid sequence ID numbers

| | | | 3. | | 5. | | |
|---|---|---|---|---|---|---|---|
| | 1. | 2. | Gene/ORF | | Lead | | |
| Application | Hit | Project | Locus | 4. | AA | 6. | 7. |
| no | no. | no.: | Name | Organism | SEQ ID | Metabolite | Consensus AA SEQ ID |
| 1 | 1 | OEX_N- | YPR138C | Saccharomyces | 690 | n/a | 951, 952, 953, 954 |
| | | Hits | | cerevisiae | | | |
| 2 | 2 | OEX_N- | b1852 | Escherichia coli | 2 | n/a | 319, 320, 321, 322 |
| | | Hits | | K12 | | | |
| 2 | 3 | OEX_N- | YNL241C | Saccharomyces | 328 | n/a | 677, 678, 679, 680 |
| | | Hits | | cerevisiae | | | |
| 3 | 4 | QEX_N- | Yjl167w | Saccharomyces | 988 | n/a | 1149, 1150, 1151, 1152, 1153, 1154, |
| | | Hits | | cerevisiae | | | 1155 |
| 3 | 5 | OEX_N- | Yml054c | Saccharomyces | 1157 | n/a | 1186, 1187, 1188, 1189, 1190, 1191, |
| | | Hits | | cerevisiae | | | 1192, 1193 |

The application's sequence listing, which the Patent Office published only in electronic form, follows.

SEQUENCE LISTING (1195 sequences)

SEQ ID NO: 1 - DNA, 1476 bp, Escherichia coli
  Escherichia coli K12
  CDS (1)..(1476)
atggcggtaacgcaaacagcccaggcctgtgacctggtcattttcggcgcgaaaggcgaccttgcgcgtcgtaaattgctgccttccctgtatcaactggaaaaagccggtcagctcaacccggacacccggattatcggcgtagggcgtgctgactgggataaagcggcatataccaaagttgtccgcgaggcgctcgaaactttcatgaaagaaaccattgatgaaggtttatgggacaccctgagtgcacgtctggatttttgtaatctcgatgtcaatgacactgctgcattcagccgtctcggcgcgatgctggatcaaaaaaatcgtatcaccattaactactttgccatgccgcccagcacttttggcgcaatttgcaaagggcttggcgaggcaaaactgaatgctaaaccggcacgcgtagtcatggagaaaccgctggggacgtcgctggcgacctcgcaggaaatcaatgatcaggttggcgaatacttcgaggagtgccaggtttaccgtatcgaccactatcttggtaaagaaacggtgctgaacctgttggcgctgcgttttgctaactccctgtttgtgaataactgggacaatcgcaccattgatcatgttgagattaccgtggcagaagaagtggggatcgaagggcgctggggctattttgataaagccggtcagatgcgcgacatgatccagaaccacctgctgcaaattctttgcatgattgcgatgtctccgccgtctgacctgagcgcagacagcatccgcgatgaaaaagtgaaagtactgaagtctctgcgccgcatcgaccgctccaacgtacgcgaaaaaaccgtacgcgggcaatatactgcgggcttcgcccagggcaaaaaagtgccgggatatctggaagaagagggcgcgaacaagagcagcaatacagaaactttcgtggcgatccgcgtcgacattgataactggcgctgggccggtgtgccattctacctgcgtactggtaaacgtctgccgaccaaatgttctgaagtcgtggtctatttcaaaacacctgaactgaatctgtttaaagaatcgtggcaggatctgccgcagaataaactgactatccgtctgcaacctgatgaaggcgtggatatccaggtactgaataaagttcctggccttgaccacaaacataacctgcaaatcaccaagctggatctgagctattcagaaacctttaatcagacgcatctggcggatgcctatgaacgtttgctgctggaaaccatgcgtggtattcaggcactgtttgtacgtcgcgacgaagtggaagaagcctggaaatgggtagactccattactgaggcgtgggcgatggacaatgatgcgccgaaaccgtatcaggccggaacctggggacccgttgcctcggtggcgatgattacccgtgatggtcgttcctggaatgagtttgagtaa

SEQ ID NO: 2 - protein, 491 aa, Escherichia coli
  Escherichia coli K12
MAVTQTAQACDLVIFGAKGDLARRKLLPSLYQLEKAGQLNPDTRIIGVGRADWDKAAYTKVVREALETFMKETIDEGLWDTLSARLDFCNLDVNDTAAFSRLGAMLDQKNRITINYFAMPPSTFGAICKGLGEAKLNAKPARVVMEKPLGTSLATSQEINDQVGEYFEECQVYRIDHYLGKETVLNLLALRFANSLFVNNWDNRTIDHVEITVAEEVGIEGRWGYFDKAGQMRDMIQNHLLQILCMIAMSPPSDLSADSIRDEKVKVLKSLRRIDRSNVREKTVRGQYTAGFAQGKKVPGYLEEEGANKSSNTETFVAIRVDIDNWRWAGVPFYLRTGKRLPTKCSEVVVYFKTPELNLFKESWQDLPQNKLTIRLQPDEGVDIQVLNKVPGLDHKHNLQITKLDLSYSETFNQTHLADAYERLLLETMRGIQALFVRRDEVEEAWKWVDSITEAWAMDNDAPKPYQAGTWGPVASVAMITRDGRSWNEFE

SEQ ID NO: 3 - DNA, 1957 bp, Leuconostoc mesenteroides
  CDS (206)..(1666)
tatctaaaagctacttcatttgttgtactcctcatttgcttttttattattgtgtaacgaacaggtgataaggtcaagtgcaaaatttcacgacagatatccaattttagatgataaacgtttaaaaaacgctgaaaacggttactttttccgctattttgcgctataatgaaaagtgaatttaactaaaaataaggggtacatcatggtttcagaaatcaagacgttagtaactttctttggtggcactggtgacttggccaagcgtaagctttacccatcagttttcaatctttataaaaaaggctacttgcaaaagcattttgccattgttggaacggcccgtcaagccctcaatgatgacgaattcaaacaattggttcgtgattcaattaaagatttcactgacgatcaagcacaagctgaggcgttcatcgaacatttctcataccgtgcacacgacgtaacagatgctgcttcatacgctgttttaaaagaggcgattgaagaagctgccgacaaatttgatatcgatggcaaccgcattttctatatgtcagttgcgccacgtttctttggtacaattgccaaatatcttaagtcagaaggcctactagctgacactggttacaaccgtttgatgattgaaaagcctttcggtacatcatatgacacagctgccgaactccaaaatgacttggaaaacgcatttgatgataaccaactattccgtattgaccactaccttggtaaggaaatggttcaaaacattgctgcccttcgctttggtaacccaattttcgatgctgcttggaacaaggattacatcaagaacgttcaagtaacattgtcagaagtcttgggtgtcgaagaacgtgccggctactatgacacagccggtgcattgcttgacatgattcaaaaccacaccatgcaaattgttggttggttagccatggaaaaaccagaatcattcactgacaaagacattcgtgccgctaaaaacgcagcctttaatgctttgaagatctatgatgaagcagaagttaacaaatactttgttcgtgcacaatatggtgccggtgattcagctgacttcaagccataccttgaagaattagacgtacctgctgattctaaaaacaataccttcatcgccggcgaattgcaatttgatttgccacgttgggagggtgtcccattctatgtccgttcaggtaagcgcttagctgctaaacagacacgggttgatatcgtctttaaggctggcacgtttaactttggttcagaacaagaagcacaagaagctgtcttgtcaattatcattgatccaaagggtgctatcgaattgaagttgaacgccaagtcagttgaagatgctttcaacacacgtacaattgacttaggttggactgtatctgacgaagataagaagaacacgccagaaccatacgaacgtatgattcacgacactatgaatggtgatggctctaacttcgctgactggaatggcgtttcaatcgcttggaagttcgttgatgctatttcagccgtttataccgcagataaagcaccacttgaaacttacaagtcgggctcaatgggtcctgaagcatccgataaattattggctgccaatggtgatgcttgggtgtttaaaggttaattaaagccccaaaaaaacgatcgattgtgatcgtttttttattgcccaatttacacagtttcatcaagaatccgttttgtttcacgaaaaacagccgctaagtttttgtactgatccgcatgcagcacaacagtaacaaagtgatgctttttgtacgtaaagaacccaacaaatgacacaccagatttaacagaaacacctaatttaccacccgtgacctgatattttgtctgactaaaatagttattcattagtgaaaaaatttgacgcttgagttgtgccattgaaagt

SEQ ID NO: 4 - protein, 486 aa, Leuconostoc mesenteroides
MVSEIKTLVTFFGGTGDLAKRKLYPSVFNLYKKGYLQKHFAIVGTARQALNDDEFKQLVRDSIKDFTDDQAQAEAFIEHFSYRAHDVTDAASYAVLKEAIEEAADKFDIDGNRIFYMSVAPRFFGTIAKYLKSEGLLADTGYNRLMIEKPFGTSYDTAAELQNDLENAFDDNQLFRIDHYLGKEMVQNIAALRFGNPIFDAAWNKDYIKNVQVTLSEVLGVEERAGYYDTAGALLDMIQNHTMQIVGWLAMEKPESFTDKDIRAAKNAAFNALKIYDEAEVNKYFVRAQYGAGDSADFKPYLEELDVPADSKNNTFIAGELQFDLPRWEGVPFYVRSGKRLAAKQTRVDIVFKAGTFNFGSEQEAQEAVLSIIIDPKGAIELKLNAKSVEDAFNTRTIDLGWTVSDEDKKNTPEPYERMIHDTMNGDGSNFADWNGVSIAWKFVDAISAVYTADKAPLETYKSGSMGPEASDKLLAANGDAWVFKG

SEQ ID NO: 5 - DNA, 2110 bp, Drosophila melanogaster
  CDS (370)..(1944)
cattggcagtgcttgcttgggcgtttgtttgctgcggcggttcgcgccgcgcttcagtcagtcagggaacgatcgtgcttatcttcattactactaccgcttccaccgaggcttcgcgactccgtacccgtactcgctttgttttacgtttgcgctactagttagtgaatccgacgacgacgacctgcgcgtgcgattaaagcgccgcaactctttgtaattacacagccagagccgcagaggttgctcaaaatccagcgactggagaaatcgtatatcgagttggaaatccgaatcgaaaggcttgcgtatacatagttgtcacacttttgcttttaaacagaaaaatccattcacattcgggtcaagatggcaacgcaaaaggaagatcacaccgccctggatctcataatcaagtcactcaagtcgcctacaatggtctgcgagggaacccactttgacggcaagattccgcacacgttcgtcatctttggggcgtcgggcgatctggccaagaagaagatctaccccacgctctggtggctctaccgcgatgacctgctgcccaagccgaccaagttctgcggctatgcccgttccatgctgaccgtcgatagcatcaaggagcagtgtctgccgtacatgaaggtccagccgcacgagcagaagaagtacgaggagttctgggccctcaatgagtacgtgtccggcagatatgacggacgcactggcttcgagctgcttaaccagcagctggagattatggagaacaagaacaaggccaaccgcatcttctatctggccctgccgcccagcgtcttcgaggaggtgactgtcaacatcaagcagatctgcatgtcggtctgcggttggaaccgcgtgattatcgagaagcctttcggccgggatgacgcctcctcgcaggcgctgagcgaccatctggccggtctgttccaggaggatcagctgtaccgcatcgatcactacctgggcaaggagatggtgcagaacctgatgaccatacgcttcggcaacaagatcctcagctcgacgtggaaccgcgagaacatcgcctccgtgctgatcacgttcaaggagcccttcggcacgcagggtcgtggcggctacttcgacgagttcggcatcatacgcgacgtgatgcagaaccatctgctgcagatcctctcgctggtggccatggagaagccggtgagctgccacccggacgacattcgtgacgagaaggtcaaggtgctgaagagcatcgaggccctgacgctggatgacatggtgctgggccagtacctgggcaatccgcagggtacaaacgatgatgcgcgcacgggctacgtggaggaccccaccgttagcaacgattcgaacacgcccacctacgccctcggcgtgctcaagatcaacaacgagcgctggcagggagtgcccttcatcctgcgctgcggcaaggcgctgaacgagcgcaaggcggaggtgcgtatccagtaccaggacgtgcccggcgacatcttcgagggcaatacgaagcgcaacgagctggtcatccgcgtccagccgggcgaggccctgtactttaagatgatgaccaagagccccggcatcacgttcgacatcgaggagacggagctggacctcacctacgagcaccgctacaaggactcctacctgccggacgcgtacgagcgtctcatcctcgacgtcttctgcggctcccagatgcacttcgtccgctcggacgagctgcgcgaggcgtggcgcatatttacgcccattctgcaccagatcgagaaggagcacattcggccaatcacctaccagtacggatcgcgcggtcccaaggaggcggaccgcaagtgcgaggagaacaatttcaagtactccggctcctacaagtggcacggcggcaaggcggccacgtccaatcactgagcgtttggagcacaccaatccccgggctgggttcgcaggatactcctctctgtccgcacgtacatgtacatacatacatatatatgtatatatacatatatgcattctttggttatttgtaattcggtctgtacaagatttttttttattaaatatacaaaatagt

SEQ ID NO: 6 - protein, 524 aa, Drosophila melanogaster
MATQKEDHTALDLIIKSLKSPTMVCEGTHFDGKIPHTFVIFGASGDLAKKKIYPTLWWLYRDDLLPKPTKFCGYARSMLTVDSIKEQCLPYMKVQPHEQKKYEEFWALNEYVSGRYDGRTGFELLNQQLEIMENKNKANRIFYLALPPSVFEEVTVNIKQICMSVCGWNRVIIEKPFGRDDASSQALSDHLAGLFQEDQLYRIDHYLGKEMVQNLMTIRFGNKILSSTWNRENIASVLITFKEPFGTQGRGGYFDEFGIIRDVMQNHLLQILSLVAMEKPVSCHPDDIRDEKVKVLKSIEALTLDDMVLGQYLGNPQGTNDDARTGYVEDPTVSNDSNTPTYALGVLKINNERWQGVPFILRCGKALNERKAEVRIQYQDVPGDIFEGNTKRNELVIRVQPGEALYFKMMTKSPGITFDIEETELDLTYEHRYKDSYLPDAYERLILDVFCGSQMHFVRSDELREAWRIFTPILHQIEKEHIRPITYQYGSRGPKEADRKCEENNFKYSGSYKWHGGKAATSNH

SEQ ID NO: 7 - DNA, 1593 bp, Fugu rubripes
  Fugu rubripes (Japanese pufferfish)
  CDS (1)..(1593)
atgatgattattttatttaactgttttttttgtgcctctttcagagaagatggccaacatcccactgtctcgctcggaggtgtttggggagctgcgaaggagctccacgaagacaaagagttccatcaatcagacgttcatgttttcatcatcatgggcgcatcgggagatctggccaagaagaaaatctacccaactctgtggtggttgttcagagacggccttctacctgagcagacatattttgtgggttttgctcgctctgctctgaccgtggatgctattcgaacatcttgcatgccttacctgaaggtgacagaaacagaatcggaccggctgtcggccttcttcagcaggaactcgtacatcagcgggaattacaccgccgggggctccttctccgagctcaacgcacacatcatgtctctgcctggggcgtccgacgcaaaccgcctcttctacctggcactgcctcccaccatctaccacagcgttactgagaacatcaagcacttctgtatgagcgccaaaggctggaacagggtgattgtagagaaaccgttcggacacgatctgcagagctccgaagagctgtccactcacctctcctcgctcttcactgaagaccagatctaccgaatagatcactacctcggcaaggaaatggtccagaacctaatggtgctcaggttcgggaaccgcatctttgggccaatctggaacagggacaacgtagcctgtgtggttcttacctttaaggagccgttcggcactcaggggagaggcggctattttgatgatttcggaatcatacgtgatgtgatgcagaaccacatgcttcagatgctctgtttggttgccatggagaaaccagcatccactaactcggatgacgtcagagatgaaaaggtgaaggtgttgaagtgcatcgttccagcgtccatgtcagatgtggtgctgggacagtatgtgggggacccagagggggagggagatgctaaactgggttatctcgatgatcccaccgttcccaaagggtcaactcaggccacctttgccacggttgtcctctacgtacacaacgaacgctgggatggggttcctttcatccttcgctgtggaaaagctctgaatgagaggaaggccgaggtgaggctgcagttcacagacgtgccgggggacattttccgtaatcagtgttacaggaacgagctcgtggtgcgcgtgcagcctaacgaggccatctacgccaagatgatgagcaagaaacctggtgtgtacttcaccccagaggaaactgagctggacctcacctacaagagcagatacaaggatgtgaaacttccggacgcctatgaacgtctcatcctggatgtcttctgtgggagtcagatgcactttgtcgcgagtgatgaattaagggaggcgtggcggatcttcacccctcttcttcatcagatagagaaggagaagcctaaacctattccttataaatatggcagtcgtggaccagcagaagcagacgagctcgagaagagagtcgggtttcgctatgaaggcacatacaagtgggtcaacccacacagactgtga

SEQ ID NO: 8 - protein, 530 aa, Fugu rubripes
  Fugu rubripes (Japanese pufferfish)
MMIILFNCFFCASFREDGQHPTVSLGGVWGAAKELHEDKEFHQSDVHVFIIMGASGDLAKKKIYPTLWWLFRDGLLPEQTYFVGFARSALTVDAIRTSCMPYLKVTETESDRLSAFFSRNSYISGNYTAGGSFSELNAHIMSLPGASDANRLFYLALPPTIYHSVTENIKHFCMSAKGWNRVIVEKPFGHDLQSSEELSTHLSSLFTEDQIYRIDHYLGKEMVQNLMVLRFGNRIFGPIWNRDNVACVVLTFKEPFGTQGRGGYFDDFGIIRDVMQNHMLQMLCLVAMEKPASTNSDDVRDEKVKVLKCIVPASMSDVVLGQYVGDPEGEGDAKLGYLDDPTVPKGSTQATFATVVLYVHNERWDGVPFILRCGKALNERKAEVRLQFTDVPGDIFRNQCYRNELVVRVQPNEAIYAKMMSKKPGVYFTPEETELDLTYKSRYKDVKLPDAYERLILDVFCGSQMHFVASDELREAWRIFTPLLHQIEKEKPKPIPYKYGSRGPAEADELEKRVGFRYEGTYKWVNPHRL

SEQ ID NO: 9 - DNA, 1506 bp, Vibrio cholerae
  CDS (1)..(1506)
atgatggtaatacctgaaaacagcagcatcgtaattttcggtgcttcgggagatttgacgtaccgtaagcttattcctgcgttgtatcacctctatgccagtcagcaactgcctaaatcgtttgcgattttaggtgtgagccgtaccgagtacagtgacgagtcttaccgcgagaagctaaagcgctcactgcaagagctggaaaaaacagaacctgccgctctcgaagccttcatgcagcatgtgcattatcaagcgctgaacacctcagaagtagctgattatcagcacttagcgacccgccttgatacactggctaacgattatcagtttgagcagcgtaatacgctgttttatctcgcaactccaccaagcttgtatggcgtgatcccagcttgccttgcggcacatggcctcaacgatgagagccaaggctggaagcgtctgatcatcgaaaaaccttttggttacgatctgcaatctgcacaagatctggatgtggaaatccaccaccacttcaaagagcatcagatctaccgtatcgaccactaccttggtaaagaaaccgtgcaaaacctgctggtgttccgctttgccaacggcatgtttgagccactgtggaaccgtaactttattgattacgtggaaatcacaggcgcagaattcctaggtgtggaagagcgcggcggttattacgatggttctggcgcggtgcgcgatatgttccaaaaccacctgctgcaagtgctggctatggtgggcatggagccgcctgcggcgatcaacgcggattccattcgtaacgaagtgaacaaggtactgcaaagcctacaaccgctttctgaatctgatctgcgcaacaatctggtgctcggtcaatacaccgaatcggaagtgcgtgggcaatttttacccagctaccgtaatgagccgggcgtggcggcggattcacgcaccgaaacttacgtcgcgctaaaaatgttcatcaataactggcgttggaatggtgtgccattctatgtgcgcagcggtaaacgtttaccaacgcgtgtcaccgaagtggtcattcacttcaaacgtacaccgcatcctgtctttgggcaaaatgcgccagagaacaagctgatcatccgtattcagcctgatgaaggcattctgatgagcttcggcttgaaagagcccggcgcaggtttcaaagccaaagaagtgtcgatgaatttccactacgcctcacttgagcagatcaaaatgctgaccgcttatgagcgtttgctgctggatgcactcaatggtgacgcgacactgtttgcccgtactgatgctgtagaagcttgttggaagtttgtgcagccgatcctcgatttcaaacaagatccgcaatcgctgtatggctacgcctgtggcacttggggcccgaaagagtcggatgacttgctgcgccgtgacggccgtgagtggcgcttcccttgtaaaaacctcactaacacggattactgcgaattatga

SEQ ID NO: 10 - protein, 501 aa, Vibrio cholerae
MMVIPENSSIVIFGASGDLTYRKLIPALYHLYASQQLPKSFAILGVSRTEYSDESYREKLKRSLQELEKTEPAALEAFMQHVHYQALNTSEVADYQHLATRLDTLANDYQFEQRNTLFYLATPPSLYGVIPACLAAHGLNDESQGWKRLIIEKPFGYDLQSAQDLDVEIHHHFKEHQIYRIDHYLGKETVQNLLVFRFANGMFEPLWNRNFIDYVEITGAEFLGVEERGGYYDGSGAVRDMFQNHLLQVLAMVGMEPPAAINADSIRNEVNKVLQSLQPLSESDLRNNLVLGQYTESEVRGQFLPSYRNEPGVAADSRTETYVALKMFINNWRWNGVPFYVRSGKRLPTRVTEVVIHFKRTPHPVFGQNAPENKLIIRIQPDEGILMSFGLKEPGAGFKAKEVSMNFHYASLEQIKMLTAYERLLLDALNGDATLFARTDAVEACWKFVQPILDFKQDPQSLYGYACGTWGPKESDDLLRRDGREWRFPCKNLTNTDYCEL

SEQ ID NO: 11 - DNA, 1476 bp, Pseudomonas aeruginosa
  CDS (7)..(1476)
caacaaatgcctgatgtccgcgttctgccttgcacgttagcgctgttcggtgcgctgggcgatctcgccttgcgcaagctgttcccggcgctctaccaactcgatcgtgagaacctgctgcaccgcgatacccgcgtcctggccctggcccgtgacgaaggcgctcccgccgaacacctggcgacgctggagcagcgcctgcgcctggcagtgccggcgaaggagtgggacgacgtggtctggcagcgtttccgcgaacgcctcgactacctgagcatggacttcctcgacccgcaggcctatgtcggcttgcgcgaggcggtggatgacgaactgccgctggtcgcctacttcgccacgccggcctcggtgttcggcggcatctgcgagaacctcgccgccgccggtctcgccgagcgcacccgggtggtgctggagaagcccatcggtcatgacctggagtcgtcccgcgaggtcaacgaggcagtcgcccggttcttcccggaaagccgcatctaccggatcgaccattacctgggcaaggagacggtgcagaacctgatcgccctgcgcttcgccaacagcctcttcgagacccagtggaaccagaaccacatctcccacgtggagatcaccgtggccgagaaggtcggcatcgaaggccgctggggctacttcgaccaggccgggcaactgcgcgacatggtgcagaaccacctgctgcaactgctctgcctgatcgccatggatccgcccagcgacctttcggcggacagcattcgcgacgagaaggtcaaggtcctccgcgccctcgagccgattcccgcagaacaactggcttcgcgcgtggtgcgtgggcagtacaccgccggtttcagcgacggcaaggcagtgccgggctacctggaggaggaacatgcgaatcgcgacagcgacgcggaaaccttcgtcgccctgcgcgtggacatccgcaactggcgctggtcgggcgtgccgttctacctgcgcaccggcaagcgcatgccgcagaagctgtcgcagatcgtcatccacttcaaggagccgccgcactacatcttcgctcccgagcagcgttcgctgatcagcaaccggctgatcatccgcctgcagccggacgaaggtatctccctgcaagtgatgaccaaggaccagggcctgggcaagggcatgcaattgcgtaccggcccgctgcaactgagtttttccgagacctaccacgcggcgcggattcccgatgcctacgagcgtctgctgctggaggtcacccagggcaaccagtacctgttcgtgcgcaaggacgaggtggagttcgcctggaagtggtgcgaccagctgatcgctggctgggaacgcctgagcgaagcgcccaagccgtatccggctgggagttgggggccggtggcctcggtggccctggtggcccgcgatgggaggagttggtatggcgatttctga

SEQ ID NO: 12 - protein, 489 aa, Pseudomonas aeruginosa
MPDVRVLPCTLALFGALGDLALRKLFPALYQLDRENLLHRDTRVLALARDEGAPAEHLATLEQRLRLAVPAKEWDDVVWQRFRERLDYLSMDFLDPQAYVGLREAVDDELPLVAYFATPASVFGGICENLAAAGLAERTRVVLEKPIGHDLESSREVNEAVARFFPESRIYRIDHYLGKETVQNLIALRFANSLFETQWNQNHISHVEITVAEKVGIEGRWGYFDQAGQLRDMVQNHLLQLLCLIAMDPPSDLSADSIRDEKVKVLRALEPIPAEQLASRVVRGQYTAGFSDGKAVPGYLEEEHANRDSDAETFVALRVDIRNWRWSGVPFYLRTGKRMPQKLSQIVIHFKEPPHYIFAPEQRSLISNRLIIRLQPDEGISLQVMTKDQGLGKGMQLRTGPLQLSFSETYHAARIPDAYERLLLEVTQGNQYLFVRKDEVEFAWKWCDQLIAGWERLSEAPKPYPAGSWGPVASVALVARDGRSWYGDF

SEQ ID NO: 13 - DNA, 1485 bp, Staphylococcus aureus
  CDS (1)..(1485)
atgagtactaaaaacaaacacatcccatgtttaatcacaatctttggtgcaactggtgacttaagccatcgtaagttgtttccatcaatattccatctctaccaacaagacaatttagatgaacatattgccatcatcggtattggacgtcgtgacattactaatgatgatttccgtaatcaagtaaaatcatcaattcaaaagcacgtaaaagatacaaacaaaattgacgcgtttatggaacatgtcttctatcatagacatgatgttagtaatgaagaaagctatcaagaattactagattttagtaatgaattagatagccaatttgaattaaaaggtaatcgactattctatttagcaatggcaccacaattctttggcgttatttctgattatctaaaatcttctggtcttactgatacaaaaggatttaaacgccttgttatcgaaaaaccattcggtagtgatttaaaatcagccgaagcattaaacaatcaaattcgtaaatcatttaaagaagaagaaatttatcgtattgaccactatttaggaaaagacatggttcaaaatatcgaggtattacgttttgcgaatgcgatgtttgaaccattatggaataacaaatatatttcaaacatccaagttacatcttctgaaatactaggtgttgaagatcgtggtggttattatgaatcaagtggcgcgctaaaagatatggtgcaaaaccacatgttacaaatggttgcattattagctatggaagcacctattagtttaaatagtgaagatatccgtgctgagaaagtaaaagtacttaaatcactgcgtcatttccaatctgaagatgttaaaaagaactttgttcgtggtcaatatggcgaaggctatatcgatggtaaacaagttaaagcataccgtgatgaagatcgcgttgcagatgactctaacacacctacctttgtttcaggtaaattaacaattgataactttagatgggctggtgtaccattctatattcgtactggtaaacgtatgaaatctaaaacaattcaagttgtcgttgaatttaaagaagtaccaatgaacttatactatgaaactgataaactgttagattcaaacctattagtaatcaatatccaacctaatgaaggtgtatctttacatctaaatgctaagaaaaatacacaaggtatcgaaacagaacctgtccaattgtcttactcaatgagcgctcaagataaaatgaatactgtagatgcatatgaaaatctattatttgattgtcttaaaggtgatgccactaacttcacgcactgggaagaattaaaatcaacatggaaatttgttgatgcaattcaagatgaatggaatatggttgatccagaattccctaactatgaatcaggtactaatggtccattagaaagtgatttactacttgctcgtgatggtaaccattggtgggacgatattcaatga

SEQ ID NO: 14 - protein, 494 aa, Staphylococcus aureus
MSTKNKHIPCLITIFGATGDLSHRKLFPSIFHLYQQDNLDEHIAIIGIGRRDITNDDFRNQVKSSIQKHVKDTNKIDAFMEHVFYHRHDVSNEESYQELLDFSNELDSQFELKGNRLFYLAMAPQFFGVISDYLKSSGLTDTKGFKRLVIEKPFGSDLKSAEALNNQIRKSFKEEEIYRIDHYLGKDMVQNIEVLRFANAMFEPLWNNKYISNIQVTSSEILGVEDRGGYYESSGALKDMVQNHMLQMVALLAMEAPISLNSEDIRAEKVKVLKSLRHFQSEDVKKNFVRGQYGEGYIDGKQVKAYRDEDRVADDSNTPTFVSGKLTIDNFRWAGVPFYIRTGKRMKSKTIQVVVEFKEVPMNLYYETDKLLDSNLLVINIQPNEGVSLHLNAKKNTQGIETEPVQLSYSMSAQDKMNTVDAYENLLFDCLKGDATNFTHWEELKSTWKFVDAIQDEWNMVDPEFPNYESGTNGPLESDLLLARDGNHWWDDIQ

SEQ ID NO: 15 - DNA, 1488 bp, Streptococcus pneumoniae
  CDS (1)..(1488)
atgtcatctaaggttattgttacaattttcggtgcgagtggagacctggctaaacgcaagctctacccttccctttttagactatataaatccggcaatctttccaagcactttgccgttattggaactgcccgtagaccttggagtaaggaatattttgaatctgtagttgtcgagtccatccttgatttggcagatagtaccgagcaagcccaagaatttgctagccacttctactatcaaagccatgatgtcaatgattcggaacattatattgctttgcgtcaattacaagctgagcttaatgaaaaataccaagctgaacacaataagctcttcttcttgtctatggcacctcagttctttggaaccattgccaaacacctcaaatctgaaaacattgtcgatggcaaaggttttgagcgcttgatcgttgaaaaaccatttggtacagattacgcaactgcaaacaagttgaatgacgaactcctagcaacatttgacgaagaacaaattttccgtatcgaccattatcttggtaaggaaatgatccaaagcatctttgcagttcgctttgcaaacttgatttttgaaaacgtttggaacaaggattttatcgacaatgttcaaattacctttgcggagcgcttgggtgtagaagaacgtggtggctactatgaccaatccggtgccctccgtgacatggtccaaaaccacactctacaacttctttcgctcctcgccatggacaaaccagcaagcttcacaaaagacgagattcgtgctgaaaagattaaggtctttaaaaacctctatcatccaactgatgaagaactcaaagaacactttatccgtgggcaataccgctctggtaagattgatggcatgaaatacatctcttatcgtagcgagccaaatgtgaatccagaatcaacaactgaaacctttacatctggtgccttctttgtagacagcgatcgattccgtggtgttcctttctttttccgtacaggtaaacgactgactgaaaaaggaactcatgtcaacatcgtctttaaacaaatggattctatctttggagaaccacttgctccaaatattttgaccatctatattcaaccaacagaaggcttctctcttagcctaaatgggaagcaagtaggagaagaatttaacttggctcctaactcacttgattaccgtacagatgcgactgcaactggtgcttctccagaaccatacgaaaaattgatttatgatgtcctaaataacaactcaactaactttagccactgggatgaagtttgtgcgtcatggaagttgattgaccgtattgaaaagctctgggctgaaaatggtgccccacttcatgactataaagctggaagcatgggacctcaagccagctttgacctacttgaaaaattcggtgccaaatggacttggcaaccagatatcacctatcgtcaagatggtcgcttagaataa

SEQ ID NO: 16 - protein, 495 aa, Streptococcus pneumoniae
MSSKVIVTIFGASGDLAKRKLYPSLFRLYKSGNLSKHFAVIGTARRPWSKEYFESVVVESILDLADSTEQAQEFASHFYYQSHDVNDSEHYIALRQLQAELNEKYQAEHNKLFFLSMAPQFFGTIAKHLKSENIVDGKGFERLIVEKPFGTDYATANKLNDELLATFDEEQIFRIDHYLGKEMIQSIFAVRFANLIFENVWNKDFIDNVQITFAERLGVEERGGYYDQSGALRDMVQNHTLQLLSLLAMDKPASFTKDEIRAEKIKVFKNLYHPTDEELKEHFIRGQYRSGKIDGMKYISYRSEPNVNPESTTETFTSGAFFVDSDRFRGVPFFFRTGKRLTEKGTHVNIVFKQMDSIFGEPLAPNILTIYIQPTEGFSLSLNGKQVGEEFNLAPNSLDYRTDATATGASPEPYEKLIYDVLNNNSTNFSHWDEVCASWKLIDRIEKLWAENGAPLHDYKAGSMGPQASFDLLEKFGAKWTWQPDITYRQDGRLE

SEQ ID NO: 17 - DNA, 1476 bp, Salmonella enterica
  Salmonella enterica subsp. enterica serovar Typhi
  CDS (1)..(1476)
atggcggtaacgcaaacagcccaggcatgtgacctggtcattttcggcgcgaaaggcgacctggcgcgccggaaactgctgccttccctgtatcagcttgagaaagccggccagatccatccggatacccggatcattggggtggggcgcgcggactgggataaagaagcttatacccacgttgtgcgtgaggcgctggaaaccttcatgaaggaaaaaattgatgaaggcttgtgggatacgctgagcggccgtctggatttttgtaatcttgacgttaacgatacgcctgcgttcagtcgcctgggcgatatgctggatcaaaaaaaccgcaccaccattaactattttgcgatgccgcccagcacgtttggcgctatttgcaaagggttaggggaggctaaactcaacgccaaaccggcgcgtgtcgtgatggagaaaccgttgggtacttcgctggcgacctcgcgtgagattaacgatcgggtcggcgaatactttgaagagtgccaagtatatcgtatcgaccactatctgggcaaagaaacggttctcaacctgctggcgctgcgttttgccaactcgttattcgttaataactgggataaccgcactatcgatcacgttgagattaccgtagcggaagaggtggggattgaagggcgctggggatattttgaccaggccggtcagatgcgcgatatgatccagaaccacttgctgcaaattctctgcatgattgccatgtcaccgccgtctgacctgagcgccgacagtattcgcgatgaaaaagtaaaagtgttgaaatcgttgcgccgtattgatcgctccaacgtgcgtgaaaaaacggttcgtggtcaatacaccgcgggctttgcgcagggtcaaaaggtgccgggctatctggaagaagagggcgcgaataaaagcagcaacaccgaaactttcgtcgcgatccgcgtcgacatcgataactggcgttgggcgggcgtgccattctatctgcgcaccggcaagcgtctgccaactaagtgctctgaagtcgtggtttatttcaagacgcctgaactgaatctctttaaagagtcctggcaagacctgccgcagaacaaattgacgattcgcctgcagccggatgaaggcgtagatattcaggtacttaacaaagtaccgaggctggatcataagcataatctgcaaatcacgaagcttgatctgagctactccgagacctttaatcagacgcacctggcggatgcatatgagcgcctgctgctggaaacgatgcgtggcattcaggcgctgtttgtccgccgtgacgaagtggaagaagcctggaagtgggtggactccattaccgaagcatgggcgatggacaacgacgcgccgaagccgtatcaggcgggcacctggggaccggtagcgtccgtggcgatgattacccgtgacggtcgttcgtggaatgagtttgagtaa

SEQ ID NO: 18 - protein, 491 aa, Salmonella enterica
  Salmonella enterica subsp. enterica serovar Typhi
MAVTQTAQACDLVIFGAKGDLARRKLLPSLYQLEKAGQIHPDTRIIGVGRADWDKEAYTHVVREALETFMKEKIDEGLWDTLSGRLDFCNLDVNDTPAFSRLGDMLDQKNRTTINYFAMPPSTFGAICKGLGEAKLNAKPARVVMEKPLGTSLATSREINDRVGEYFEECQVYRIDHYLGKETVLNLLALRFANSLFVNNWDNRTIDHVEITVAEEVGIEGRWGYFDQAGQMRDMIQNHLLQILCMIAMSPPSDLSADSIRDEKVKVLKSLRRIDRSNVREKTVRGQYTAGFAQGQKVPGYLEEEGANKSSNTETFVAIRVDIDNWRWAGVPFYLRTGKRLPTKCSEVVVYFKTPELNLFKESWQDLPQNKLTIRLQPDEGVDIQVLNKVPRLDHKHNLQITKLDLSYSETFNQTHLADAYERLLLETMRGIQALFVRRDEVEEAWKWVDSITEAWAMDNDAPKPYQAGTWGPVASVAMITRDGRSWNEFE

SEQ ID NO: 19 - DNA, 1476 bp, Listeria monocytogenes
  CDS (1)..(1476)
atgacagatgagttagaacaaaaagcactgattactatttttggcggtacgggagatttggcaaatcgcaaactttacccttcgctatatcatttgtacagtaagggatctcttggcgacaattttgctgttattggaacggctcgtcgtgaatggagtaacgatttcttccgtgataaagtaaaagagtctatcaaagacattgacggttctgaaaaagacgcagatgcatttgcttctcacttctactatcaatctcatgatgtgacaaataaagaatcttatctaactttaaaagatttgtctgatgaattagatgcaaaatacgaattagatggcaatcgccttttctatcttgcaatggcgccaaatttctttggaactatcgcaagtcgcattaaatctgaaggctttgttgatacagacggtttccatcgtttaattatcgaaaaaccattcggccatgatttagctagtgcggaagaattaaacaattcacttcgtcaagctttcaaggaagatgaaatttatcgtattgaccattatttaggaaaagaaatgatccaaaatatttcggttattcgttttgcaaattctattattgaatcgctttggaataatcgttacatcgataatattcaagttactttaacagaggtacttggagtcgaagatcgtggacgctattacgatgaaagtggcgcacttcgagacatggttcaaaatcatatcttacaaatcgtttctttacttgcaatggagccaccgattaacttatctactcgcgagattcgtcatgaaaaagttcgcgcgcttcgttctttacgcgtttttgaaggaaaagaagtgcatcaaagctttatccgtggtcaatatggtcccggtgaagtggatggtaaagagttaaaaggttatcgtcaagaagataatgtggatccccattccaatacggaaacatttgttgcagccaaacttgaaatcgataatttccgctgggctggcgtaccattttacattcgcactggtaaacgtcttgcgaagaaaacaacgcaaattgcgattcagtttaaagatgtcccactaaacttattcgggcaacaacaatcacttggtggtaatgtgcttgttattcatatccaaccggacgaaggtattacacttcatttgaacgtaaaagaacctggtcaaggtatggttacgatgccagtcaacttgaattatattcattcctctccagacggcatgaacacacctgaggcttacgaaaaattgattctagactgtcttcgcggtgacgcgacttacttctctcactgggatgaagtatcgctatcatggaactttatcgaccatatagcagatgtttggacaaatacgaaagatcatttcccgaactacaaatccggttcaatggggccaaaagaagcagacgacctcattcaacgtgacggattccagtggttcccgatcgattaa

SEQ ID NO: 20 - protein, 491 aa, Listeria monocytogenes
MTDELEQKALITIFGGTGDLANRKLYPSLYHLYSKGSLGDNFAVIGTARREWSNDFFRDKVKESIKDIDGSEKDADAFASHFYYQSHDVTNKESYLTLKDLSDELDAKYELDGNRLFYLAMAPNFFGTIASRIKSEGFVDTDGFHRLIIEKPFGHDLASAEELNNSLRQAFKEDEIYRIDHYLGKEMIQNISVIRFANSIIESLWNNRYIDNIQVTLTEVLGVEDRGRYYDESGALRDMVQNHILQIVSLLAMEPPINLSTREIRHEKVRALRSLRVFEGKEVHQSFIRGQYGPGEVDGKELKGYRQEDNVDPHSNTETFVAAKLEIDNFRWAGVPFYIRTGKRLAKKTTQIAIQFKDVPLNLFGQQQSLGGNVLVIHIQPDEGITLHLNVKEPGQGMVTMPVNLNYIHSSPDGMNTPEAYEKLILDCLRGDATYFSHWDEVSLSWNFIDHIADVWTNTKDHFPNYKSGSMGPKEADDLIQRDGFQWFPID

SEQ ID NO: 21 - DNA, 1530 bp, Nostoc sp.
  Nostoc sp. PCC 7120
  CDS (1)..(1530)
atggttagtctcctagaaaatcccttgcgcgttggtctgcaacaacaagggatgcccgaaccccaaattatagtcatctttggcgcttctggtgatcttacctggcgcaaactcgtcccagcactttacaaattgcggcgggaacgacgcattcccccagaaactaccattgttggtgtagcccgtcgggaatggagccacgaatacttccgcgaacaaatgcaaaagggcatggaagaggctcatagcagtgtcgaacttggagaactgtggcaagatttctctcaaggtctgttctactgccctggagacatagataacccggaaagttatcaaaaactgaagaatttgttaagcgaattagacgagaaacgaggtacacggggcaaccggatgttttacctctccgtcgcccctaacttcttccctgaagctatcaagcaactagggggagcaggaatgttagacgacccatacaaacatcgtctagtaattgaaaaaccatttggtagagatttggcatcagcccaaagcctgaacgcagtagtgcagaagtattgtaaagaacaccaagtctaccgcatcgaccactacttgggtaaagaaacagttcaaaacttactggtattccgcttcgccaatgccatttttgaacccctgtggaatcgtcagtttgttgaccacgtacaaattaccgtggcagaaaccgtaggcgtggaagaccgggctggttattacgaaaaagccggcgcactgcgggatatgttgcagaaccacctgatgcagctttattgcctgacagcaatggaagcaccaaactcaatggatgccgatagcatccgtacagaaaaagtcaaagtgttacaagctactcgcctggctgacgtacacaacctatcacgttcagcaatacgcggacaatacagcgctggttggatgaaaggtcaacaagttcctgggtatcggacagaaccaggagttgacccaaattcctccacccctacttatgtaggtatgaagtttttagttgacaactggcgttggcaaggtgttcctttctacctgcgtactggcaaacggatgccgaagaaagtcagtgagatttctatccacttccgcgatgtgccttctcggatgttccaatctgccgcgcaacaaagaaacgccaacattttagctatgcggattcagccaaatgaaggaatttccttgcgttttgatgtgaaaatgccaggagccgaattccgtacccgttccgtagatatggatttcagctatggttcctttgggattgaagctacttccgacgcttacgatcgcctattcttagattgtatgatgggcgaccaaacattattcaccagagccgacgaagtagaagcagcttggcaggtagtcacccccgccctttctgtttgggactcacccgccgaccccgccaccattccccagtacgaagccggaacctgggaaccagcagaagcagaatttctgattaaccaagatggtcgtcgctggcgcagactgtag

SEQ ID NO: 22 - protein, 509 aa, Nostoc sp.
  Nostoc sp. PCC 7120
MVSLLENPLRVGLQQQGMPEPQIIVIFGASGDLTWRKLVPALYKLRRERRIPPETTIVGVARREWSHEYFREQMQKGMEEAHSSVELGELWQDFSQGLFYCPGDIDNPESYQKLKNLLSELDEKRGTRGNRMFYLSVAPNFFPEAIKQLGGAGMLDDPYKHRLVIEKPFGRDLASAQSLNAVVQKYCKEHQVYRIDHYLGKETVQNLLVFRFANAIFEPLWNRQFVDHVQITVAETVGVEDRAGYYEKAGALRDMLQNHLMQLYCLTAMEAPNSMDADSIRTEKVKVLQATRLADVHNLSRSAIRGQYSAGWMKGQQVPGYRTEPGVDPNSSTPTYVGMKFLVDNWRWQGVPFYLRTGKRMPKKVSEISIHFRDVPSRMFQSAAQQRNANILAMRIQPNEGISLRFDVKMPGAEFRTRSVDMDFSYGSFGIEATSDAYDRLFLDCMMGDQTLFTRADEVEAAWQVVTPALSVWDSPADPATIPQYEAGTWEPAEAEFLINQDGRRWRRL

SEQ ID NO: 23 - DNA, 1386 bp, Agrobacterium tumefaciens
  CDS (1)..(1386)
atgaaagcatcagccacggacagacagcgatcggacgtgctggtggtgttcggcgccacgggtgatcttgcctataagatgatctttccctctctctacgccatggtgaaacgcggcgcgctgcaaacgcccatcatcggagtcgctttcgacgattggccgcgtgagcagctgatagcgcgggcgcgcgatgcggtcgccaaccatttggacaagatcgatgaagccgtcttcgaaaaattcgccgcacagctgacctatgtctccggcgattatcgcaacgaagcgacattcgaaaagctgcgcacggcgcttggcgggcaccagcatccgctttattatctcgccattccgccttccctgttcgaaaccgtggtaaccggcctcaacagggcgggcatcgccgcttcggcccggctgatggtggagaaaccctttggccgtgaccttgcctccgccgaagccttaaatgaagcgttgcacgcggttttcgcagaggatgctattttccgcatcgaccatttcctgggcaaggaagccatccagaaccttctttattttcgttttgccaatgcctttctagagcccgtgtggaatcgcgaccacgttgagagcgtgcagatcaccatggccgaagatttcggcatcagggggcgcggcaagttttatgacgaagtcggatgtatccgcgatgtgatccagaaccatctgatcaatgtgctgttgctgctggccatggagccgccagccaccagcgcctcggatgatctcgtcgatgaaaaagtgcagatactgaaagccatgccgccgctcacccgcgatgatgtggtgcgcggacagttcagaggttatctggacgagccgggtgtcgcctcggcgtccaaccgggaaaccttcgccgccgcccgctttcgcgtcgccacctggcgctggaatggcgtgcctttcttcatccggtccggcaagaacctgccggcgcatgcaaccgaagtcgtggtccgcttcaagcggccgccaattgcgctctttggcgatgtcgagacaacgcccgccaattatgtgcgcttccgtctgggcccggatatcgcgatcggaatcggtgcgcgtcgcaaggcagctggcgatggcatgcgcggcgaggccgtagaactcggcgcggtcgatgacggtatcggtgacatggcgccttatgagcggctgatcggcgatgcgatggccggcgagcgtcagctctttacccgccaggatgcggcggaactggcctggaagatcgtggagcctatcctcgatgatcccgccgtgccgcctgtctatgaggtgggaagctggggcccggcggaaatggcagggtttggcccgccaggcggatgggttgatcccgaataa

SEQ ID NO: 24 - protein, 461 aa, Agrobacterium tumefaciens
MKASATDRQRSDVLVVFGATGDLAYKMIFPSLYAMVKRGALQTPIIGVAFDDWPREQLIARARDAVANHLDKIDEAVFEKFAAQLTYVSGDYRNEATFEKLRTALGGHQHPLYYLAIPPSLFETVVTGLNRAGIAASARLMVEKPFGRDLASAEALNEALHAVFAEDAIFRIDHFLGKEAIQNLLYFRFANAFLEPVWNRDHVESVQITMAEDFGIRGRGKFYDEVGCIRDVIQNHLINVLLLLAMEPPATSASDDLVDEKVQILKAMPPLTRDDVVRGQFRGYLDEPGVASASNRETFAAARFRVATWRWNGVPFFIRSGKNLPAHATEVVVRFKRPPIALFGDVETTPANYVRFRLGPDIAIGIGARRKAAGDGMRGEAVELGAVDDGIGDMAPYERLIGDAMAGERQLFTRQDAAELAWKIVEPILDDPAVPPVYEVGSWGPAEMAGFGPPGGWVDPE

SEQ ID NO: 25 - DNA, 1476 bp, Brucella melitensis
  CDS (1)..(1476)
atgaccagtcagacaattccggtagatcccttcgactgcatcgtttttggtggcaccggcgatcttgccgagcgcaagcttattccggcgctttatcagcgccagcgcgcaggccagctttccgaccccacacgcatcatcggcgcctcgcgcagccagatgaccgacgacgaatatcgcaccttcgccggcaatgcgatcaaggaacatgtgaaaccggaagaggtggatcaggccgaagttgaaatcttcctcaagcggctgcactatgtggcggtggacgccaagtccgacgagggctgggatgcgctgaagaccctgatcggcaagaagccggaaaagatccgagccttttatctggccgtcagcccgaccctgttcggcgatatcgccacgcggctcaaggcgcatggcctcatcacgcgcgatacgcgcatcgtcgtggaaaagccgattggccgcgatctcgattccgccaaggcgctcaacgacacgctgggcagtgtgttccgcgaagaccagattttccgcatagaccactatctcggcaaggaaacggtgcagaacctgatggcgctgcgctttgccaatgcgctctacgagccgctgtggaactccgcccatatcgaccatgtgcagatcacggtggcggaagccgtgggccttgaaggccgcgcaggctattacgacaaggcgggcgcgctgcgcgacatggtgcagaaccacattctccagcttctctgccttgttgccatggaaccgccatcctcgattgaggccgacgccgtacacgacgagaaggtaaaggttctgcgctccctgcagccgatctccacgcataatgtcgaggaactgacggtccgcggacaatatcgcgcgggcgcttccgcaggcgggccggtcaagggctatctggaagaccttgaaagcgacaccagcaatacggaaacattcgtggcgctgaaggcggaaatcgccaactggcgctgggcgggtgtgccgttctatctgcgcaccggcaagcgccttgccacgcgtgtttcggaaatcgtcatcacgttcaagcccattccgcattccatctttggcgaaagcgcgggcaaggtgattgccaatcagcttgtcatccgcctgcaaccggacgaaggcgtgaagcaatggctgatgatcaaggatcccggtccgggtggaatgcgcctgcgccacatgccgctcgacatgagctttgcggaatccttcgaggatcgcaacccggatgcctatgagcgcctcatcatggatgtggtgcgcggcaaccagaccctgttcatgcgccgcgacgaagtggaagcggcctggcgctggatcgacccgatccttcaggcatgggagttcaacagccagcccgtgcagggctatacggctggcacatgggggccttcgtcctccatcgcgctcattgagcgcgatggccgcacctggcacgaaagcctctaa

SEQ ID NO: 26 - protein, 491 aa, Brucella melitensis
MTSQTIPVDPFDCIVFGGTGDLAERKLIPALYQRQRAGQLSDPTRIIGASRSQMTDDEYRTFAGNAIKEHVKPEEVDQAEVEIFLKRLHYVAVDAKSDEGWDALKTLIGKKPEKIRAFYLAVSPTLFGDIATRLKAHGLITRDTRIVVEKPIGRDLDSAKALNDTLGSVFREDQIFRIDHYLGKETVQNLMALRFANALYEPLWNSAHIDHVQITVAEAVGLEGRAGYYDKAGALRDMVQNHILQLLCLVAMEPPSSIEADAVHDEKVKVLRSLQPISTHNVEELTVRGQYRAGASAGGPVKGYLEDLESDTSNTETFVALKAEIANWRWAGVPFYLRTGKRLATRVSEIVITFKPIPHSIFGESAGKVIANQLVIRLQPDEGVKQWLMIKDPGPGGMRLRHMPLDMSFAESFEDRNPDAYERLIMDVVRGNQTLFMRRDEVEAAWRWIDPILQAWEFNSQPVQGYTAGTWGPSSSIALIERDGRTWHESL

SEQ ID NO: 27 - DNA, 1458 bp, Zymomonas mobilis
  CDS (1)..(1458)
atgacaaataccgtttcgacgatgatattgtttggctcgactggcgacctttcacagcgtatgctgttgccgtcgctttatggtcttgatgccgatggtttgcttgcagatgatctgcgtatcgtctgcacctctcgtagcgaatacgacacagatggtttccgtgattttgcagaaaaagctttagatcgctttgtcgcttctgaccggttaaatgatgacgctaaagctaaattccttaacaagcttttctacgcgacggtcgatattacggatccgacccaattcggaaaattagctgacctttgtggcccggtcgaaaaaggtatcgccatttatctttcgactgcgccttctttgtttgaaggggcaatcgctggcctgaaacaggctggtctggctggtccaacttctcgcctggcgcttgaaaaacctttaggtcaagatcttgcttcttccgatcatattaatgatgcggttttgaaagttttctctgaaaagcaagtttatcgtattgaccattatctgggtaaagaaacggttcagaatcttctgaccctgcgttttggtaatgctttgtttgaaccgctttggaattcaaaaggcattgaccacgttcagatcagcgttgctgaaacggttggtcttgaaggtcgtatcggttatttcgacggttctggcagcttgcgcgatatggttcaaagccatatccttcagttggtcgctttggttgcaatggaaccaccggctcatatggaagccaacgctgttcgtgacgaaaaggtaaaagttttccgcgctctgcgtccgatcaataacgacaccgtctttacgcataccgttaccggtcaatatggtgccggtgtttctggtggtaaagaagttgccggttacattgacgaactgggtcagccttccgataccgaaacctttgttgctatcaaagcgcatgttgataactggcgttggcagggtgttccgttctatatccgcactggtaagcgtttacctgcacgtcgttctgaaatcgtggttcagtttaaacctgttccgcattcgattttctcttcttcaggtggtatcttgcagccgaacaagctgcgtattgtcttacagcctgatgaaaccatccagatttctatgatggtgaaagaaccgggtcttgaccgtaacggtgcgcatatgcgtgaagtttggctggatctttccctcacggatgtgtttaaagaccgtaaacgtcgtatcgcttatgaacgcctgatgcttgatcttatcgaaggcgatgctactttatttgtgcgtcgtgacgaagttgaggcgcagtgggtttggattgacggaattcgtgaaggctggaaagccaacagtatgaagccaaaaacctatgtctctggtacatgggggccttcaactgctatagctctggccgaacgtgatggagtaacttggtatgactga

SEQ ID NO: 28 - protein, 485 aa, Zymomonas mobilis
MTNTVSTMILFGSTGDLSQRMLLPSLYGLDADGLLADDLRIVCTSRSEYDTDGFRDFAEKALDRFVASDRLNDDAKAKFLNKLFYATVDITDPTQFGKLADLCGPVEKGIAIYLSTAPSLFEGAIAGLKQAGLAGPTSRLALEKPLGQDLASSDHINDAVLKVFSEKQVYRIDHYLGKETVQNLLTLRFGNALFEPLWNSKGIDHVQISVAETVGLEGRIGYFDGSGSLRDMVQSHILQLVALVAMEPPAHMEANAVRDEKVKVFRALRPINNDTVFTHTVTGQYGAGVSGGKEVAGYIDELGQPSDTETFVAIKAHVDNWRWQGVPFYIRTGKRLPARRSEIVVQFKPVPHSIFSSSGGILQPNKLRIVLQPDETIQISMMVKEPGLDRNGAHMREVWLDLSLTDVFKDRKRRIAYERLMLDLIEGDATLFVRRDEVEAQWVWIDGIREGWKANSMKPKTYVSGTWGPSTAIALAERDGVTWYD

SEQ ID NO: 29 - DNA, 1470 bp, Bacillus subtilis
  CDS (1)..(1470)
atgaaaacaaaccaacaaccaaaagcagtaattgtcatattcggtgcaactggagatttagcaaaacgaaaattgtatccgtctattcaccgtttatatcaaaacggacaaatcggagaagagtttgcagtggtaggagttggaagaagaccttggtctaatgaggatcttcgccaaactgttaaaacatccatttcctcatctgcagataagcatatagatgatttcacgtctcatttttactatcacccgtttgacgtgacaaaccctggttcttatcaagagctaaacgtattgcttaaccagctggaagatacatatcaaattcctaacaacagaatgttctacttggcaatggctcctgaattcttcggaacgattgcaaaaacattaaaatcagagggtgtaacagctacaaccggctggtcccgccttgtcatcgaaaaaccgttcggccatgatctgccaagcgcacaggcattgaataaagaaatccgcgaagcatttacggaagatcaaatttacagaatcgaccattatctaggcaaacaaatggttcagaacattgaagtgattcgatttgccaatgcgattttcgaaccgctttggacaaaccgctacatttcaaacattcaaatcacatctagcgaatcactaggcgttgaagaccgcgcaagatattacgaaaaatcaggcgcccttcgcgacatggtgcaaaaccatattatgcagatggttgcccttcttgcaatggagccgcctatcaaattgaacacagaagaaatccgcagcgagaaagtgaaggtgctgagagcactgcgtcctattgcaaaagacgaagtggatgaatactttgtgcgcggacaatatcatgctggtgaaattgacggtgtaccggttcctgcttatacagatgaagataatgtcgctcctgactccaatacagaaacctttgttgccggcaagctcttgatcgacaacttcagatgggctggtgttccattctacatcagaaccggaaaacgaatgagagaaaagtccacaaaaattgtcgttcaatttaaggacattccgatgaacctgtactacggtaatgaaaacaacatgaatccgaacttgcttgtcattcatattcagcctgacgaaggcattacgctttacttaaatgctaaaaagcttggcggagcagcacacgcacagccaatcaaactcgattattgcagcaattgcaatgacgagttgaacacccctgaagcatatgaaaaactaattcacgactgtcttcttggcgatgcaacaaactttgcacactgggatgaagttgccctttcttggagctttgtcgactctatttctgaaacatgggcagcaaacaaaaccttatctcctaactacgaatcaggctcaatgggaccgaaagaatctgatgatcttttggtgaaagacggcttacactggtggaacatataa

SEQ ID NO: 30 - protein, 489 aa, Bacillus subtilis
MKTNQQPKAVIVIFGATGDLAKRKLYPSIHRLYQNGQIGEEFAVVGVGRRPWSNEDLRQTVKTSISSSADKHIDDFTSHFYYHPFDVTNPGSYQELNVLLNQLEDTYQIPNNRMFYLAMAPEFFGTIAKTLKSEGVTATTGWSRLVIEKPFGHDLPSAQALNKEIREAFTEDQIYRIDHYLGKQMVQNIEVIRFANAIFEPLWTNRYISNIQITSSESLGVEDRARYYEKSGALRDMVQNHIMQMVALLAMEPPIKLNTEEIRSEKVKVLRALRPIAKDEVDEYFVRGQYHAGEIDGVPVPAYTDEDNVAPDSNTETFVAGKLLIDNFRWAGVPFYIRTGKRMREKSTKIVVQFKDIPMNLYYGNENNMNPNLLVIHIQPDEGITLYLNAKKLGGAAHAQPIKLDYCSNCNDELNTPEAYEKLIHDCLLGDATNFAHWDEVALSWSFVDSISETWAANKTLSPNYESGSMGPKESDDLLVKDGLHWWNI

SEQ ID NO: 31 - DNA, 1401 bp, Mycobacterium tuberculosis
  CDS (1)..(1401)
atggttgacggcggaggtggcgcgtcagatctgttggtgatcttcggaattaccggtgacctggcccgcaagatgaccttccgcgcgttgtatcggctcgagcgccaccagttgctggactgccccatcctgggtgtggccagtgacgacatgtccgtcgggcagttggtcaagtgggctcgcgagtccatcggtcgtaccgaaaagatcgacgatgcggtgttcgaccggttggcgggccggttgtcctacctgcacggtgacgtcaccgacagccagctctacgattcgctggccgaactgattggctcggcctgtcggccgctgtattacctggaaatgccgccggcgctgttcgcgccgattgtcgaaaatctcgcgaacgtgcggctgttggagcgcgcacgcgttgccgtggaaaagccgttcggccacgacctggcctccgcgctcgaactcaacgcccggctgcgagcggtgttgggcgaagaccaaatcctgcgtgtggaccactttctgggcaagcagcccgtcgtcgagctggagtacctgaggttcgccaatcaggcgttagccgagctctgggatcgcaacagcatctccgagatccacatcaccatggccgaggacttcggggtggaggaccgcggcaagttttacgacgccgtcggtgccctgcgtgacgtggtgcaaaaccatctgctgcaggtgctggcgctggtgacgatggaaccgccggtcggttccagcgccgatgacctcaacgacaagaaggccgaggtcttccgggcgatggcgccgctggatcccgatcggtgcgtgcgtgggcagtacctcggctacaccgaagttgcgggcgtagcaagcgattcggcgaccgaaacgtatgtcgcgctgcgaaccgagatcgacaactggcgctgggccggggtgccgatcttcgtgcgggccggaaaagagctgcccgcgaaggtcaccgaagtacggctatttctacgccgagttccggcattggcctttctgcccaaccgccgaccggccgagcccaaccagattgtgctgcgtatcgaccccgatccgggtatgcgactgcagatttcggcccacaccgacgactcgtggcgagatatccacctggactcctcgttcgcggtggacctcggtgaaccgatacgaccctatgagcggctgctgtatgccggattggtcggcgatcaccagttgttcgcccgcgaggacagcatcgagcagacgtggcggatcgtgcagccgctgctcgacaacccgggtgaaatccatcggtacgatcgcggttcctggggtccggaagccgcgcagtcgttgctgcgcggtcaccgcggttggcagtcgccgtggctgccccgcggcacggacgcatga

SEQ ID NO: 32 - protein, 466 aa, Mycobacterium tuberculosis
MVDGGGGASDLLVIFGITGDLARKMTFRALYRLERHQLLDCPILGVASDDMSVGQLVKWARESIGRTEKIDDAVFDRLAGRLSYLHGDVTDSQLYDSLAELIGSACRPLYYLEMPPALFAPIVENLANVRLLERARVAVEKPFGHDLASALELNARLRAVLGEDQILRVDHFLGKQPVVELEYLRFANQALAELWDRNSISEIHITMAEDFGVEDRGKFYDAVGALRDVVQNHLLQVLALVTMEPPVGSSADDLNDKKAEVFRAMAPLDPDRCVRGQYLGYTEVAGVASDSATETYVALRTEIDNWRWAGVPIFVRAGKELPAKVTEVRLFLRRVPALAFLPNRRPAEPNQIVLRIDPDPGMRLQISAHTDDSWRDIHLDSSFAVDLGEPIRPYERLLYAGLVGDHQLFAREDSIEQTWRIVQPLLDNPGEIHRYDRGSWGPEAAQSLLRGHRGWQSPWLPRGTDA

SEQ ID NO: 33 - DNA, 1545 bp, Mycobacterium tuberculosis
  CDS (1)..(1545)
atgaaaccggcccacgccgcggcgtcgtggcgcaacccgctacgagacaagcgggacaagcgattacccagaatcgccggcccgtgcggcatggtgattttcggcgtcaccggcgacctggcccgcaagaaggtgatgccggccgtctacgatttggccaaccgcggcctgctgccgcccacattctcgctggtggggtttgcccgccgagactggagcacccaggatttcggtcaagtggtgtacaacgccgtccaagagcactgccgaacaccgtttcggcaacagaactgggaccggctggccgagggattccgttttgtgccaggcactttcgacgacgacgacgcgttcgcccaactcgccgagacgctggagaagctcgacgccgagcgcggcaccggcggcaaccacgccttctacctggcgatcccgcccaaatccttcccggtggtgtgtgagcagctgcacaagtccggcctggcccgcccgcaaggcgaccggtggagccgagtcgtgatagagaagccgttcggccacgacctggccagcgcacgcgagctgaacaaggcggtcaacgcggtcttcccggaggaagcggtcttccgcatcgaccactacctgggcaaagagacggtgcagaacatcctggcgctgcggttcgccaaccagctgttcgacccgatctggaatgcgcactacgtcgaccacgtacagatcaccatggccgaagacatcggcctgggcgggcgcgcgggctattacgacggcatcggcgcggcccgcgatgtcatccagaaccatctcatgcagctgctggcgctgaccgcgatggaggagccggtcagcttccacccggcagcgttgcaggccgagaagatcaaggtgctctcggccacccgccttgccgagccactcgaccagaccaccagccgcggccagtacgccgccggctggcaaggcggggagaaggtggttgggctgctcgacgaggaggggttcgccgaggactccaccaccgaaaccttcgccgctatcaccctggaagtcgatacgcgccggtgggccggcgtgccgttctatctgcgaacgggaaaacgattgggccgccgggtgaccgagatcgctctggtcttcaggcgggcgccgcatctgccgttcgacgccaccatgaccgacgagctgggcaccaacgcgatggtcatccgcgtgcagcccgacgaaggtgtcacattgcggttcggctccaaggtgccgggcaccgccatggaagtccgcgacgtcaacatggacttctcctacggctcggcattcgccgaagattcaccggaggcctacgagcggctcatcctcgacgtcctgctcggcgagccctcgctgtttccggtcaacgcggaggtcgaactggcgtgggagatcctcgatccagcgttggaacattgggcggcacacgggacgcccgacgcctacgaggcaggtacctggggtccggaatcatccttggagatgctgcgccgcaccggccgggaatggcggcggccatga

SEQ ID NO: 34 - protein, 514 aa, Mycobacterium tuberculosis
MKPAHAAASWRNPLRDKRDKRLPRIAGPCGMVIFGVTGDLARKKVMPAVYDLANRGLLPPTFSLVGFARRDWSTQDFGQVVYNAVQEHCRTPFRQQNWDRLAEGFRFVPGTFDDDDAFAQLAETLEKLDAERGTGGNHAFYLAIPPKSFPVVCEQLHKSGLARPQGDRWSRVVIEKPFGHDLASARELNKAVNAVFPEEAVFRIDHYLGKETVQNILALRFANQLFDPIWNAHYVDHVQITMAEDIGLGGRAGYYDGIGAARDVIQNHLMQLLALTAMEEPVSFHPAALQAEKIKVLSATRLAEPLDQTTSRGQYAAGWQGGEKVVGLLDEEGFAEDSTTETFAAITLEVDTRRWAGVPFYLRTGKRLGRRVTEIALVFRRAPHLPFDATMTDELGTNAMVIRVQPDEGVTLRFGSKVPGTAMEVRDVNMDFSYGSAFAEDSPEAYERLILDVLLGEPSLFPVNAEVELAWEILDPALEHWAAHGTPDAYEAGTWGPESSLEMLRRTGREWRRP

SEQ ID NO: 35 - DNA, 1320 bp, Chlamydia trachomatis
  CDS (1)..(1320)
atgaagcttgccgttcagcatttctctcactcatcggaaatagatattcgagtttgggaaagtctggaaaatagaatcttttaccaccaagctaatttttctgatgccgaaggctactctgttctgaaagcttatttggagcaactagatcaacaatatggaacacaagggaatcgtcttttttatttatcaacaccaccagattatttccaggaaatcatccgcaatttaaatcggcatcagctattctatcatgaacaaggagcacaacagccttggtctcggctaattatagaaaagccttttggagttaatttagaaacagctcgagagcttcaacaatgcattgatgccaatattgatgaagagtcggtttatcgaatagaccattatttaggaaaagaaacggttcaaaacattctgactattcgttttgctaatactctctttgagtcttgctggaattctcagtacatagatcatgtgcaaatcagcgttagcgaatcaattggtataggatctcgagggaatttcttcgaaaagtcgggcatgctacgagacatggtacagaatcatttgacgcagctgctatgtctactgactatggaacctccttctgaatttttttccgaagaaataaaaaaagaaaaaattaaaattctaaagaaaattcttcctatccgcgaagaagatgctgttcgtggccagtatggtgaagggattgtgcaagatgtttcagttctgggctatcgggaggaagaaaatgtcgatccgaattcttcagtagaaacctacgttgcgttaaaattatttatcgacaatcctcgctggaaaggggttcccttttacttacaagcagggaaacgtcttcctaaaagaacaacagatatcgctgtgatctttaaaaaatccagctacaatttattcaatgcagagaattgtcctttgtgtccgttagagaatgatttacttattattcgtattcaaccggatgaaggtgttgcgttacaatttaactgcaaggttccaggaacaaataagctcgtacgtcctgtaaaaatggacttccgttacgacagctattttaatactgttactcccgaagcttatgaacggttactgtgcgactgtatccttggggacagaacgctattcactagcaatgaagaagtcttagcatcttgggaactattttctcctctattagaaaaatggtctcaagtacgccctatattccctaactatatggctggatctttacgtcctcaagaagctgatgaactattatctagagatggaaaagcttggcggccctattaa

SEQ ID NO: 36 - protein, 439 aa, Chlamydia trachomatis
MKLAVQHFSHSSEIDIRVWESLENRIFYHQANFSDAEGYSVLKAYLEQLDQQYGTQGNRLFYLSTPPDYFQEIIRNLNRHQLFYHEQGAQQPWSRLIIEKPFGVNLETARELQQCIDANIDEESVYRIDHYLGKETVQNILTIRFANTLFESCWNSQYIDHVQISVSESIGIGSRGNFFEKSGMLRDMVQNHLTQLLCLLTMEPPSEFFSEEIKKEKIKILKKILPIREEDAVRGQYGEGIVQDVSVLGYREEENVDPNSSVETYVALKLFIDNPRWKGVPFYLQAGKRLPKRTTDIAVIFKKSSYNLFNAENCPLCPLENDLLIIRIQPDEGVALQFNCKVPGTNKLVRPVKMDFRYDSYFNTVTPEAYERLLCDCILGDRTLFTSNEEVLASWELFSPLLEKWSQVRPIFPNYMAGSLRPQEADELLSRDGKAWRPY

SEQ ID NO: 37 - DNA, 1773 bp, Deinococcus radiodurans
  CDS (1)..(1773)
atgaccgaccggccccgtcccaaaaagagcagtccgaaaaagagtggccccgagaaggccctcgccaaggaaagtgccgcgcagggcgaggcggccaaggcgacccggcaggccactcagcagaccgaggcggccaagaaggtcggtgtggcccagcccggcgctccggcgcagtcccgcaaagcggcccgcaagtcacgccagcgggtgcccaagcacgccggggacaatgcccccaaaagcgacgcgcccggcgccgacggccagaatccctttcgcaccgccatgcgccgcagccgcgcgcccgaacctgccacgctggtgattttcggcgcgaccggcgaccttgcccggcgcaagttgctgcccgccgtgttcggcctgtggcaagacggcctgctcggcagcgcgttcaacatcgtcggcgtgggccggcaggaaatggacgacgagcagttcaaggactacgccatagacgccctgaagacctccaaggaaaccgacgaaatcaaggaaggcagcctggaaaagttccgcgagctgctctactacgaatacggcgaattcggcgaggacgaggtgtacgacaaggtccgcagtgaactcgaccgcgccgagaccgcccgtggcggcggcaagaacgcgctgttttacctctccaccccgccgagcctcttcgagccgatttcgagcggcctggggcggcagggcctgcaagacgagacggaaggctggcggcgcatcgtcatcgaaaaacccttcgggcgcgacctgcaatcggcccgcgaactcaacgacgccattcaccgcgtctgggacgagtcgcaggtgtaccgcatcgaccattatctcggtaaggagacggtgcagaacctgatggcgatccgtttcgggaacgccattttcgagccgctgtggaaccgggggtttgtcgaccacgtgcagatcacggcgtccgaggacctggggctggagggccgcgccgggtactacgaggaagcgggcatcgtgcgcgacatgctgcaaaaccacctgatgcagctttttaccctgaccgccatggaagcgccctcggcgttcgaggccgacgccatccgcgacgagaaggtcaaggtgctgcgggccgtcaagcgcattccggcggaccgggtgcccgaagtcgccgtgcgcgggcagtacggccccggcgccctcgacggccagaccgtgcccggctacaagcaggagccggacgtaaagcgcggcagccgcacgcccacctacgtcgccgtcaagctcgaggtggacaactggcgctggcagggcgtgccgtttttcctgcgcaccggcaagcgcttgcccaagaaagtcaccgaaatcgccgtggtgttcaagcgcccgccgctgggcctctttcccggcggactggagcgcaacgtgctggccttccgcattcagcccgacgaaggcgtgagcctgaagttctcctccaaatcgccggggcaagagatggtgctgcgcgaggtcgtgatggatttccgttacgacgccttcggggcacagctcgaaagcccctactcgcgcttgctgctcgacgcgatgctcggcgacgccaccctctttccccgcgaggacgaggtggaccacgcctggcaaatcgtctcgggcatcttgcaggcctgggaaggcgcggacgcggcggcccccaaattccccaactacgcggcgggcacctggggccccgacgccgccgatgagctgctcggccccggacggcgctggaggcggctgtga

SEQ ID NO: 38 - protein, 590 aa, Deinococcus radiodurans
MTDRPRPKKSSPKKSGPEKALAKESAAQGEAAKATRQATQQTEAAKKVGVAQPGAPAQSRKAARKSRQRVPKHAGDNAPKSDAPGADGQNPFRTAMRRSRAPEPATLVIFGATGDLARRKLLPAVFGLWQDGLLGSAFNIVGVGRQEMDDEQFKDYAIDALKTSKETDEIKEGSLEKFRELLYYEYGEFGEDEVYDKVRSELDRAETARGGGKNALFYLSTPPSLFEPISSGLGRQGLQDETEGWRRIVIEKPFGRDLQSARELNDAIHRVWDESQVYRIDHYLGKETVQNLMAIRFGNAIFEPLWNRGFVDHVQITASEDLGLEGRAGYYEEAGIVRDMLQNHLMQLFTLTAMEAPSAFEADAIRDEKVKVLRAVKRIPADRVPEVAVRGQYGPGALDGQTVPGYKQEPDVKRGSRTPTYVAVKLEVDNWRWQGVPFFLRTGKRLPKKVTEIAVVFKRPPLGLFPGGLERNVLAFRIQPDEGVSLKFSSKSPGQEMVLREVVMDFRYDAFGAQLESPYSRLLLDAMLGDATLFPREDEVDHAWQIVSGILQAWEGADAAAPKFPNYAAGTWGPDAADELLGPGRRWRRL

SEQ ID NO: 39 - DNA, 1467 bp, Pseudomonas aeruginosa
  CDS (1)..(1467)
atgagtacaccagccactccaacgtcctgcgacatcctggtcttcggcggtaccggcgacctggccctgcacaagctgctgccggcgctctatcgcctgcaccgggaggaccgcctgccggccgatacacggatcttcgccctcgcccgcagcgcgctggacaacgccgccttcctcgccctcgccgagcgcaacgtccgcgcggtggtggcgcgcagcgagttcgccgccgaacaatggaaaggcttcgccgcgcgcctcgactacctggccatggacgcctcgcagagcgccgacttcggccgtctcgcgcggcacctgaagagcagcgagggccgggtgctggtgcactacctggcgacctcgccgagcctgttcgcgccgatcgcgcagaacctctccatcgccggcctcgccgggccgcaagcgcgcatcgtgctggaaaaaccgctgggccattcgctggactcggcgagggcgatcaaccagtccatcggccgggtgttcgacgagtcgcgggtgttccgcatcgaccactacctgggcaaggaaaccgtgcagaacctgatggccctgcgcttcgccaatgcgttgttcgagccggtctggcgcgcggcgcacatcgaccatgtgcagatcagcgtcaacgagacccttggcgtggagaaccgtggcggctactacgaccacgccggggcgatgcgcgacatggtgcagaaccatctgctccagttgctctgcctggtggcgatggaggcgccggtgcgtttcgacgccgaggctgtgcgcaacgagaagctcaaggtgctgcaggcgctgaagccgatctccgggctcgacgtgcaggacaagacggtacgcggccagtacgccgccggcaggatcggcggccaggaggtgccggcgtactacttcgagaagaacgtcgacaacgacagcgataccgagaccttcgtcgcgctccaggccgaggtcgagaactggcgctgggccggggtgccgttctacctgcgcaccggcaagcgcatggcgcgcaagtgctcggaaatcgtcatccagttcaagccggtgccgcacagcctgatcgacggcggcggcgggccggccaaccgcctgtggataaggttgcagccggaggagcggatcagcgtgcaactgatggccaagaccccgggcaagggcatgcaactggaaccggtggagctggacctcaacctggccgaggccctcagccgcaacaagcggcgctgggacgcctacgaacgcctgctgctggacgtgatcgagggcgactcgacgctgttcatgcgccgcgacgaggtagaggccgcctggggctgggtcgacccgatcctcgccggctggcgcgagcactaccagagcccgcggccctacccggccggcagcaacggcccggaacaggcgcaactgctgctggaactgcagggtcgacgctggctggaatga

SEQ ID NO: 40 - protein, 488 aa, Pseudomonas aeruginosa
MSTPATPTSCDILVFGGTGDLALHKLLPALYRLHREDRLPADTRIFALARSALDNAAFLALAERNVRAVVARSEFAAEQWKGFAARLDYLAMDASQSADFGRLARHLKSSEGRVLVHYLATSPSLFAPIAQNLSIAGLAGPQARIVLEKPLGHSLDSARAINQSIGRVFDESRVFRIDHYLGKETVQNLMALRFANALFEPVWRAAHIDHVQISVNETLGVENRGGYYDHAGAMRDMVQNHLLQLLCLVAMEAPVRFDAEAVRNEKLKVLQALKPISGLDVQDKTVRGQYAAGRIGGQEVPAYYFEKNVDNDSDTETFVALQAEVENWRWAGVPFYLRTGKRMARKCSEIVIQFKPVPHSLIDGGGGPANRLWIRLQPEERISVQLMAKTPGKGMQLEPVELDLNLAEALSRNKRRWDAYERLLLDVIEGDSTLFMRRDEVEAAWGWVDPILAGWREHYQSPRPYPAGSNGPEQAQLLLELQGRRWLE

SEQ ID NO: 41 - DNA, 1422 bp, Caulobacter crescentus
  CDS (1)..(1422)
atggtgctgctgggcggagcgggcgatttggccctccggatgctgctgccttctctgtatttcctggagctcgaccgactgctgccgcacgatctgcggatcattggcgtcgcccgggccgaccatgacgcggccagctacaaggcgctggtccgcgagcaactgggcaagcgcgcgacagtggaggaggcggtttggaatcgcctcgccgcgcgcctcgactacgtgcctgcgaacatcaccagtgaggaagacaccaagaagctggccgaacggatcggtgcgcatggcacgctggtcatcttcttctcgctgtcgcccagcctctacggcccggcttgccaggctttgcaggccgccggcctgacggggcccaacacgcgcttgatcctcgaaaagccgcttggccgcgatctcgaaagctccaaggccaccaacgccgccgtcgccgctgtggtcgacgagagccaagtgttccgcatcgaccactatctgggcaaggaaaccgtccagaacctgacggccctgcgcttcgccaacgtgctgttcgagcccctgtgggatcgcaacacgatcgaccatgtgcagatcaccatcgccgagaccgaaaaggtcggcgaccgctggccctactacgacgaatacggcgcgctgcgggacatggtgcagaaccacatgctgcaactgctgtgtctggtcgccatggaagcgccctcaggcttcgatcccgatgcggtgcgcgacgagaaggtcaaggtgctgcgctccctgcggcccttcaccaaggagaccgtggcccacgacaccgtgcgtggccagtacgtcgccggtgtggtcgagggcggcgcgcgcgctggctatgtcgaggaagtgggcaagcccaccaagaccgagactttcgtggccatgaaggtcgcgatcgacaactggcgttgggacggcgtgccgttcttcctgcgcaccggcaagaacctgccggaccgccgcacccagatcgtcgtccagttcaagcctttgccgcacaacatcttcggtccggcgaccgatggcgagctgtgcgccaaccgcctagtcatcgacctgcagccggacgaagacatctcgctgacgatcatgaacaagcgtccgggtctctcggacgagggcatgcgactgcagtcgctgccgctgtcgctgtcgtttggccagaccggcgggcgccgtcgcatcgcttacgaaaagctgttcgtcgacgccttccgcggcgaccgtacgctgttcgtgcgtcgcgatgaggtcgagcaggcctggcgcttcatcgacggcgtctcggcggcctgggaagaggccagtatcgaaccggcgcactatgcggcgggcacctggggaccgcagtccgcccagggcctgatctcgcccggcggccgagcctggaaggcctga

SEQ ID NO: 42 - protein, 473 aa, Caulobacter crescentus
MVLLGGAGDLALRMLLPSLYFLELDRLLPHDLRIIGVARADHDAASYKALVREQLGKRATVEEAVWNRLAARLDYVPANITSEEDTKKLAERIGAHGTLVIFFSLSPSLYGPACQALQAAGLTGPNTRLILEKPLGRDLESSKATNAAVAAVVDESQVFRIDHYLGKETVQNLTALRFANVLFEPLWDRNTIDHVQITIAETEKVGDRWPYYDEYGALRDMVQNHMLQLLCLVAMEAPSGFDPDAVRDEKVKVLRSLRPFTKETVAHDTVRGQYVAGVVEGGARAGYVEEVGKPTKTETFVAMKVAIDNWRWDGVPFFLRTGKNLPDRRTQIVVQFKPLPHNIFGPATDGELCANRLVIDLQPDEDISLTIMNKRPGLSDEGMRLQSLPLSLSFGQTGGRRRIAYEKLFVDAFRGDRTLFVRRDEVEQAWRFIDGVSAAWEEASIEPAHYAAGTWGPQSAQGLISPGGRAWKA

SEQ ID NO: 43 - DNA, 1512 bp, Agrobacterium tumefaciens
  CDS (1)..(1512)
atgatgccccaacctttgaagatcgagagaatcgatatgagcagtcagatcattcctgttgaaccttttgattgtgtcgttttcggcggcacgggcgatcttgccgagcgcaagcttctgccggccctttatcaccggcaggtcgaaggccagttcacggagccgacccgcatcatcggcgcgtcgcgttcggtcatgacccatgaggaatatcgcaaattcgcgcaggacgccctgaaggaacacctgaaggccggcgaatatgacgatgcgcaggtgaccctgttcctcaaccggcttttctacgtgcccgtcgatgccaagtccggcaatggctgggacgtgctgaagaaactgctcgatgagggcaaggaacgcatccgcgcgttttatctggccgtcgcacccggcattttcggcgacatcgccgacaagatccgtgagcacaagctgatcacccgctcgacccgcatcgtcgttgaaaagccgatcggccgggatctcgcatccgcgcaggaactgaacgacaccatcggtcacgtcttcaaggaagagcagatcttccgcatcgaccactatctcggcaaggagacggtgcagaacctgatggcgctgcgtttcgccaatgcgctttacgagccgctgtggaattccgcccatatcgaccacgttcagatcaccgttgccgaagcggtgggtcttgaaggtcgcgccggttattacgacaaggccggtgcgctgcgcgacatggtgcagaaccacattctccagctgctttgcctcgttgccatggagccgcccgcttccatgaaatcggaggcagtgcgcgacgaaaagctcaaggtactgcgctcgctgaagccaatcgataccagcaatgtcgaaaagctgacggtacgcggccagtaccgcgccggcgcttccgcaggcggccccgtcaagggttatctggaagagctggaaggcggcgtttccaacaccgaaaccttcgtcgccatcaaggctgaaatcgccaactggcgctgggccggcgttcccttctacatccgcaccggcaaacgcctcgcgacccgtgtttcggaaatcgtcgtcaccttcaagcagatcccgcactcgatcttcgacgatgcggctggcaagatcgaagccaacaagctggtcattcgcctgcagccggatgaaggcgtcaagcagtcgctcctcatcaaggatcccggtccaggcggcatgcgcctgcgtcaggtctcgctggacatgagctttgccgaagccttcaacgtgcgcagccccgatgcctatgagcggctgttgatggacaccattcgttccaaccagacattgttcatgcgccgcgacgaggtcgaggccgcgtgggactggatcgaccccatcttgaagagctgggaagagctgggacagagcgtacagggttacactgccggcacctggggcccgagcggttcgatcgcactgatcgagcgcgacggccgcacctggcacgatgccgactga

SEQ ID NO: 44 - protein, 503 aa, Agrobacterium tumefaciens
MMPQPLKIERIDMSSQIIPVEPFDCVVFGGTGDLAERKLLPALYHRQVEGQFTEPTRIIGASRSVMTHEEYRKFAQDALKEHLKAGEYDDAQVTLFLNRLFYVPVDAKSGNGWDVLKKLLDEGKERIRAFYLAVAPGIFGDIADKIREHKLITRSTRIVVEKPIGRDLASAQELNDTIGHVFKEEQIFRIDHYLGKETVQNLMALRFANALYEPLWNSAHIDHVQITVAEAVGLEGRAGYYDKAGALRDMVQNHILQLLCLVAMEPPASMKSEAVRDEKLKVLRSLKPIDTSNVEKLTVRGQYRAGASAGGPVKGYLEELEGGVSNTETFVAIKAEIANWRWAGVPFYIRTGKRLATRVSEIVVTFKQIPHSIFDDAAGKIEANKLVIRLQPDEGVKQSLLIKDPGPGGMRLRQVSLDMSFAEAFNVRSPDAYERLLMDTIRSNQTLFMRRDEVEAAWDWIDPILKSWEELGQSVQGYTAGTWGPSGSIALIERDGRTWHDAD

SEQ ID NO: 45 - DNA, 1437 bp, Borrelia burgdorferi
  Borrelia burgdorferi (Lyme disease spirochete)
  CDS (1)..(1437)
atgaaagaaagaagtgtttctaattttgatattgtaatttttggggttaccgggaatttgtctagaaaaaagcttattccttcactttttaatttatttaaaaataaatgtattagcaattttagggttattggtttttctcgtaagatttttacagataaagaatttagattgtatattaaagattctttatggcaggaagagaccgattcgttgattgagatttttttaaatttttttgtttatgtatttggcgattttaatgaaaaggagtcttataaaaatttatttaaatttttagatagaagtcgagaaacgatatattatctttcgacgtctcctgcattttatggacctataattaatcatttgaaaaagtattttttaagcgaaaaattgactttgtcaaaaatagttcttgagaagccttttggctctagtcttgagacagcaaaaaaattaaatagtttgctttattctgcttttaaagaagatcaaatttatagaatagatcactatttgggtaaagaaacggttcaaaatatttttacatttagattcggcaattctatttttgaaaatatttggaataatcgttatgtagattttgttcagattacggtagcagaagaattaggtcttgatggaagagtagagtattacgattctgttggcgctttgaaggatatggttcaaaatcatattttacaattgttaagccttgttgcaatggagtctcctattaaatttgattctgagtttattcatgatgaaaaagtaaaagttttaaaaagtttgaggaaaattagcaaagaagatattaagaattacattgttaagggtcaatatataggctcacaagttcaaggggtttttaaaaaaggctataaagatgaaacagaatttttgggaaattcaaataccgaaacttatttagctatgaaagtgtttattaataattggcgttggtctggggttcctttttatcttagaactgggaaaggtcttgctaggaaattttcagaaatatatattcaatttaaaaaaccgagctttactctttttaacaatagttctgttgatttttctaatgctttgatatttagaattcagccaagggatggaattgaaatcaaattcaataccaagaagcccggatataattatgaaattcaaactgctaatatggagttttcatatcacggagcatttaaaagattgtttgatgaggcttatgagcgtttattgttagacgcttttttaggagatggtactttatatgcgacaagtgatgagattgaaagttcttgggaatttgtttcagatattgcaaataaatgggcagatattgaaatttgtaattatttttatggctctgaaggaccaaaagagatagactctattttagaaaaagatcatttttggcgtaaaatttaa

SEQ ID NO: 46 - protein, 478 aa, Borrelia burgdorferi
  Borrelia burgdorferi (Lyme disease spirochete)
MKERSVSNFDIVIFGVTGNLSRKKLIPSLFNLFKNKCISNFRVIGFSRKIFTDKEFRLYIKDSLWQEETDSLIEIFLNFFVYVFGDFNEKESYKNLFKFLDRSRETIYYLSTSPAFYGPIINHLKKYFLSEKLTLSKIVLEKPFGSSLETAKKLNSLLYSAFKEDQIYRIDHYLGKETVQNIFTFRFGNSIFENIWNNRYVDFVQITVAEELGLDGRVEYYDSVGALKDMVQNHILQLLSLVAMESPIKFDSEFIHDEKVKVLKSLRKISKEDIKNYIVKGQYIGSQVQGVFKKGYKDETEFLGNSNTETYLAMKVFINNWRWSGVPFYLRTGKGLARKFSEIYIQFKKPSFTLFNNSSVDFSNALIFRIQPRDGIEIKFNTKKPGYNYEIQTANMEFSYHGAFKRLFDEAYERLLLDAFLGDGTLYATSDEIESSWEFVSDIANKWADIEICNYFYGSEGPKEIDSILEKDHFWRKI

SEQ ID NO: 47 - DNA, 1548 bp, Treponema pallidum
  Treponema pallidum subsp. pallidum (syphilis spirochete)
  CDS (1)..(1548)
atggggaaaatcagtggcagcggcacggtcgcgccgcacatcctggttatctttggcgcttcaggcgaccttgccgcgcggaagcttatcccctcgctttgggatctctttgagcaagagctcctgccccgtacattcggtatactcggcgcagggcgtacggctctgtctacagagtcttttcgcgcacggcttgcagaggcggtcacaaagcatgcagtgcgcacaccgcacgacccggcgcgcctcaccgaattcctgcagaagatccactacttctcgttcgatcccaccgactctgtcgcctttgccgactttgccacgtacgtgcgcaccctcgaccagtcgctgcacaccgagggcaactttatcttctatcttgccactccccctagcctgtacgaaactatccccacgcagcttgctatgcaccacttgaaccgggaacagggtaattttcgcagggtagttattgaaaaaccctttggctacaacctagaaaccgcgcagcaccttaatgcgagcttgcgtgcccactttcaggaaaaccaaacctatcgcatcgatcactatctgggtaaggaaacggtccaaaacatcctggtcactcgctttgccaatccccttttcgagcccacatggaaccggacccatatcgattacgttgaaattactgcaagcgaatcactaggtgtcgaaaaccgcggcggttactacgaccagtccggtgcattgcgcgatatgatccaaaaccacttgttactcctcttgggtattatcgcgatggaggcgcccgccgtcgtgagttcaagtcgtctacgggatgaaatcgtaaaggtctttgactgcctgcgccctatgggagaacgcgacgtcatgcagcatacggtgcgtgcccaatacgtcgccggcaagatacgcggtgtagccgtccccggctaccttgaggagtcaggcgttgaccctcgctcgtgcactgaaacctttgccgcactcaagtgctacatcgacaattggcggtggatggacgttcccttctacctgcggacgggtaagcgtttgcccacgggcgtcactgaggtgatcgtccattaccgaacgctccccatcgcgcttttcgagcacatcgaacgcccgtgcgcacgcgagggcaacgcgcttgtcattcgcattcaacccgacgaaggaattcagcttaaaatcgacctcaaagagcccggcgcggggttcaagactattcccgtcagtgttgattttcagtattcggctcttacctattcgcacttacccagcgcgtatgagcggctattgcttgactgcatgaatggagacaacacgctctaccatcgagatgacgcggtggagtctgcatggcgcttcatagatcctattcttgccgcatggaaatcaaacaagagtcctctacttacgtaccctgcaggaagctggggtccgaaggctgcagacgacctgatcaaagggagtgctccacggtggcatcacccctcttctacgctgctcagcgatgattttgcctgccgactctag

SEQ ID NO: 48 - protein, 515 aa, Treponema pallidum
  Treponema pallidum subsp. pallidum (syphilis spirochete)
MGKISGSGTVAPHILVIFGASGDLAARKLIPSLWDLFEQELLPRTFGILGAGRTALSTESFRARLAEAVTKHAVRTPHDPARLTEFLQKIHYFSFDPTDSVAFADFATYVRTLDQSLHTEGNFIFYLATPPSLYETIPTQLAMHHLNREQGNFRRVVIEKPFGYNLETAQHLNASLRAHFQENQTYRIDHYLGKETVQNILVTRFANPLFEPTWNRTHIDYVEITASESLGVENRGGYYDQSGALRDMIQNHLLLLLGIIAMEAPAVVSSSRLRDEIVKVFDCLRPMGERDVMQHTVRAQYVAGKIRGVAVPGYLEESGVDPRSCTETFAALKCYIDNWRWMDVPFYLRTGKRLPTGVTEVIVHYRTLPIALFEHIERPCAREGNALVIRIQPDEGIQLKIDLKEPGAGFKTIPVSVDFQYSALTYSHLPSAYERLLLDCMNGDNTLYHRDDAVESAWRFIDPILAAWKSNKSPLLTYPAGSWGPKAADDLIKGSAPRWHHPSSTLLSDDFACRL

SEQ ID NO: 49 - DNA, 1278 bp, Helicobacter pylori
  CDS (1)..(1278)
atgttagattttgatttggttctttttggcgcgactggggatttagccatgcgaaagctctttgtttcgctctatgaaatttatactcattatggttttaaaaacgattctaggattatcgcatcggggcgtaaggagctatccaatgaagaatttttaacactcctttgtgagaaaacacaactgcattcaagagaaaagggtagggaatttttagcccatatcagttatttgtgcgttcgtttggataaccctaaagactttgaagaattgagtaaaatcgctacaaaaaataaacccttgattttctacttttctatctcgcctagtttttttgcaacgaccgcccaacatttggccaaaaacgcgctcaatcacgccaacacacgcttgattttagaaaagcctttagggcatgatttaaagacatgtaaagagattttccaaagcattagcgttttttttaaagaagaacaaatctttagaatcgatcattatttagggaaaaagggcgttcaaaatatccttgaattgcgcctgaataaccctattttaaatattttatgggatcaaatcagcgcagttgaaatctgcgtgtatgagactttgggggtggaagaaagaggcgaattttacgataaaatcggggctttaagggatatggttcaaaaccatctcttgcaagttttatcccttatcgctacagatttacccaacaatttaaaggatttgaggaaagaaaaaatcaaagttttaaaaaccttacaaccccctaaagattttaaaaaacaggttattcgggcccaatatcaaggctatagagatgaaaataaggtccataaagagagccagacagagacttttgttgctattaaagcctttttggatacgcccaaatttaaaggcgtgcctttctaccttaagcacgctaaaaaaatgccccacaaccaagcgagcgtgaaaatccattttaacgcggtcaatacgctagaatttttcctctctcaagataaaatcaccctcaccctaaaagatcatcaaaacccccttattttagaaacccataacaaacaagaatttttacggccctacgctaaattgctctatgatgcgatacaaaataaccacaataatttcgcccaccagttggaattagaagcgtcatgggtttttattgacacgctcatagagggttttatgaataacgccacgcccttatattcctatgaaagccaccatctaaacgaatcagaatttttaaaaccactctatcaataa

SEQ ID NO: 50 - protein, 425 aa, Helicobacter pylori
MLDFDLVLFGATGDLAMRKLFVSLYEIYTHYGFKNDSRIIASGRKELSNEEFLTLLCEKTQLHSREKGREFLAHISYLCVRLDNPKDFEELSKIATKNKPLIFYFSISPSFFATTAQHLAKNALNHANTRLILEKPLGHDLKTCKEIFQSISVFFKEEQIFRIDHYLGKKGVQNILELRLNNPILNILWDQISAVEICVYETLGVEERGEFYDKIGALRDMVQNHLLQVLSLIATDLPNNLKDLRKEKIKVLKTLQPPKDFKKQVIRAQYQGYRDENKVHKESQTETFVAIKAFLDTPKFKGVPFYLKHAKKMPHNQASVKIHFNAVNTLEFFLSQDKITLTLKDHQNPLILETHNKQEFLRPYAKLLYDAIQNNHNNFAHQLELEASWVFIDTLIEGFMNNATPLYSYESHHLNESEFLKPLYQ

SEQ ID NO: 51 - DNA, 1446 bp, Neisseria meningitidis
  CDS (1)..(1446)
atgagtacacaaacaaattttgatttggtgttgttcggtgcgaccggcgatttggcaatgcgcaaacttttgccctgcctgtatcaggcgcacgtggccggtttgcttcatcccgaaggtcgtattttgggtgtgagccgcagcgaattggataccgaaggttttctggcgaaggtggaaaccagttccaaaatccatgtgaaagaaaatttttccgatgaggcttgggcatcgtttgtcgaacgtctcgcatatctcaaagtcgatgttacgcagccggacgattttgctgctttgggcgatttggtcaaagcgcgcaagaatactgaaaatgtcgtgatctacctctcaactgcgccgaaattctttgcgcaagcctgcgagaaccttgctgcgatcggtttgaatgccgacaacgtgcgcgtggttttggaaaaaccgttgggtacggacttggcttcttcccaacaaatcaatactgatgttgcgcgttatttcaaagaagggcaaatttaccgcatcgaccactaccttggcaaagaaagcctgcaaaacctgcttgcgctgcgttttgccaatgtaatgttcgagccgctgtggaacaataaatatatcgaaagcgtgcagttgaccatcgccgaacagctcggtgtggaagagcgcggtgagttttacgacattaccggcgcgttgcgcgatatggtgcaaaaccatttgatgcagatgttgtgcatgactgcgatggaagcccccgccagcttggatgccgacgcggtgcgcgatgaaaaagtcaaagtcatcaagtcattgaagccgctgaccgtcgaatctgtcaatgaaaacgtcgtgcgcggacaatataccgccgccaaaggcatgaacggctatcttgaagaaatcaacgttctgcaagacagctttaccgaaacctacgtcgccattaaagccgaaatcgaaaacgaacgctggaagggcgttcccttctacctgcgtaccggcaagcgcatggcgggcaaagtggcggaaatcgttttgaacttcaaagatttgaacagccatatttttgaaggcagccgcaccgcgcccaaccggctcgttatcgagttgcaaccatatgaatccgtgcgcctctatacgcagatgaaaaccccgggggcaggaaataaggtcgaaaccgtgccgctggcaaccgatttgggcaaggcattggaaagccgccgcgcggaagcttacgagcgcctgctgctggatgtgattaacggcaaactcgctttgtttaaccgccgcgacgaacttgaagccgcgtgggaatatgtgatgccgattttggaaaactggacaaataacaccacgccgccgcacggctacggcgcacactcgtgggggcctgaagccgcgcgcgaactattggcgcgcgacggacacaagtggcacgaagagcagtaa

SEQ ID NO: 52 - protein, 481 aa, Neisseria meningitidis
MSTQTNFDLVLFGATGDLAMRKLLPCLYQAHVAGLLHPEGRILGVSRSELDTEGFLAKVETSSKIHVKENFSDEAWASFVERLAYLKVDVTQPDDFAALGDLVKARKNTENVVIYLSTAPKFFAQACENLAAIGLNADNVRVVLEKPLGTDLASSQQINTDVARYFKEGQIYRIDHYLGKESLQNLLALRFANVMFEPLWNNKYIESVQLTIAEQLGVEERGEFYDITGALRDMVQNHLMQMLCMTAMEAPASLDADAVRDEKVKVIKSLKPLTVESVNENVVRGQYTAAKGMNGYLEEINVLQDSFTETYVAIKAEIENERWKGVPFYLRTGKRMAGKVAEIVLNFKDLNSHIFEGSRTAPNRLVIELQPYESVRLYTQMKTPGAGNKVETVPLATDLGKALESRRAEAYERLLLDVINGKLALFNRRDELEAAWEYVMPILENWTNNTTPPHGYGAHSWGPEAARELLARDGHKWHEEQ

SEQ ID NO: 53 - DNA, 1296 bp, Aquifex aeolicus
  CDS (1)..(1296)
atgagttcgggagacacagagttaagaaaaaggattgaatttataatcttcggcggaaccggggatctgagcagaaataaattaattcccgcaatcctgaaactgaaagacaaaatagatttaaagaagatttacattttaggcaggaataggaaaaagtttgaagaaataaaagaaaagtttaaggatttttcagagttattcgtgttcgtagaattcctcgcggagagggaagagagttataaaaatatatcaagtattttaggaaaagaatctttaaaagttttttaccttgcggtacctcccgacctattcaaggaaattctagaaaacgtaggaaaatacctgaactttccagaaaaacgtattgttattgaaaaacctttcggcctcagcttaaagcacgcaaaggacttaaacaaaataatttccgtttatttcaaagaagaagaaatcttcagaatagatcactacctcggaaagccgcaggttcaaaatatactcgcctttaagttctcaaattacgtgttttccgaagtcttaaacaagtgtcttgtagagaaggtggaggtaattgcccttgaagaggtgggagtagagggcagaaaagcttattacgagaaagtgggagtcataagggacatgctacagaatcacatgttgctcctctcctctttaatcgttatgagactccctccaagggcggaggacttccactttgagctgaagaacgccttaaagcgtgccgagtttgagtccgagagcttgatactcggaaagtacaaaagttatcaaggaaaagctcccacttttgcccttgtaaaactccactttgacgacgagcgtttcaccggagtgcctttcgtactcgccacgggaaaaaagttaaagaaaaaattgacgagggtgtgcatccactttaagaacttcccgaaggagattgaacggcttctcggctgcgttcctgagagaaatttactcgtttttgaactctatccagagcaggaagtttcctttagggtaaacgttatatctccacttggctttttgaggtgtacggaaagtattaactggagagtttccctcaaagacgttctgggagaaattcccgaagcttacgagtccctccttctggacgtcataaggggagacaagacgctctttctggacgcagaggagacggagatactctgggaaaaaacagaacctctattgaaaaaagaaaaggaagttttgacttacgatgacagagtccttattccagaatttgcagaggatttcatttcctgcctttga

SEQ ID NO: 54 - protein, 431 aa, Aquifex aeolicus
MSSGDTELRKRIEFIIFGGTGDLSRNKLIPAILKLKDKIDLKKIYILGRNRKKFEEIKEKFKDFSELFVFVEFLAEREESYKNISSILGKESLKVFYLAVPPDLFKEILENVGKYLNFPEKRIVIEKPFGLSLKHAKDLNKIISVYFKEEEIFRIDHYLGKPQVQNILAFKFSNYVFSEVLNKCLVEKVEVIALEEVGVEGRKAYYEKVGVIRDMLQNHMLLLSSLIVMRLPPRAEDFHFELKNALKRAEFESESLILGKYKSYQGKAPTFALVKLHFDDERFTGVPFVLATGKKLKKKLTRVCIHFKNFPKEIERLLGCVPERNLLVFELYPEQEVSFRVNVISPLGFLRCTESINWRVSLKDVLGEIPEAYESLLLDVIRGDKTLFLDAEETEILWEKTEPLLKKEKEVLTYDDRVLIPEFAEDFISCL

SEQ ID NO: 55 - DNA, 1491 bp, Thermotoga maritima
  CDS (1)..(1491)
atgaagtgcagtctgggattggagaaatgtccggatgataccctccggtgttttccaaagatcgaacaacctttcggaattgtgatcttcggtgcttctggtgacctcacaaaaagaaagctcattcccgctttgaacaggttgttcgaggcaggtattctgcccgaacgctttttcgttctcggtgcggcacgaacgaaaatggacgataagaaattcagatccagattcgatgccaaccctgattttttggaacattgcagttacatcagcgtggattatcaggatcctgagagcttcaaacagttgaaaaacaccatcgagactctcataaaaaggatcgattccagcaatctggtcttctatctcgctgttcctccggatctttacatccctattctggaaaacctctcgaaaactggattgaacgaaaaacctgcgcgcgttgtgatcgaaaaaccgttcgggaaagacctggaatcggccagaagactggaagacactcttcagaaatacttccaggaagatcagattttcagaatcgatcattaccttggaaaagaaaccgttcagaacatactggtgttcaggtttgccaacttcatattcgaggaaatctggaacaacaagttcgtggatcacgttcagatcacgatggccgaagacataggtgttgaacacagggcaggatacttcgaaaacgtgggactcctcagggatatcttccagaaccacatgcttcagatcctcgcactgatcgccatggaacctccttcttctttcaatggagagaatttcagaaacgagcgggtgaagcttctcagatcgatcagaccgttccctgtggaggaactggaaagctggatcgtcagaggccagtatggaagaggggttgtgaacggaaaagaagtgccggcttacagagaggaaccgggtgtggccaaagactccaacgtggaaaccttcgttgccatgaaactcttcatagacaactggagatggagcggtgtacccttctatctgaggtccgggaagagactccccaagaaaataaccgaggttgctgttgttttcaagaagattcctcattcgatctttgccggtgtaccttctgatgaactggagccgaacacgatagttttcaccttgcagccaaacgagggaatctctcttgagtttcaggtgaaaaggccctgtcccggcatgtttccacagcttctcagtatggacttcagatacgaggattactttggagtgaaactgcccgacgcttacgaaagactccttctggacgtgatacttggagatcctacacttttcatgagaagagacgacctcgaagtttcctgggaacttctcgatcccgttctcaaagcctgggaaaacgatcccgttcgcttttcaccttatgtgtatccggcgggaacgtggggaccgagagaagccgatctactcatagaaagggacggtagaaaatggagaaaactgtga

SEQ ID NO: 56 - protein, 496 aa, Thermotoga maritima
MKCSLGLEKCPDDTLRCFPKIEQPFGIVIFGASGDLTKRKLIPALNRLFEAGILPERFFVLGAARTKMDDKKFRSRFDANPDFLEHCSYISVDYQDPESFKQLKNTIETLIKRIDSSNLVFYLAVPPDLYIPILENLSKTGLNEKPARVVIEKPFGKDLESARRLEDTLQKYFQEDQIFRIDHYLGKETVQNILVFRFANFIFEEIWNNKFVDHVQITMAEDIGVEHRAGYFENVGLLRDIFQNHMLQILALIAMEPPSSFNGENFRNERVKLLRSIRPFPVEELESWIVRGQYGRGVVNGKEVPAYREEPGVAKDSNVETFVAMKLFIDNWRWSGVPFYLRSGKRLPKKITEVAVVFKKIPHSIFAGVPSDELEPNTIVFTLQPNEGISLEFQVKRPCPGMFPQLLSMDFRYEDYFGVKLPDAYERLLLDVILGDPTLFMRRDDLEVSWELLDPVLKAWENDPVRFSPYVYPAGTWGPREADLLIERDGRKWRKL

SEQ ID NO: 57 - DNA, 1518 bp, Saccharomyces cerevisiae
  CDS (1)..(1518)
atgagtgaaggccccgtcaaattcgaaaaaaataccgtcatatctgtctttggtgcgtcaggtgatctggcaaagaagaagacttttcccgccttatttgggcttttcagagaaggttaccttgatccatctaccaagatcttcggttatgcccggtccaaattgtccatggaggaggacctgaagtcccgtgtcctaccccacttgaaaaaacctcacggtgaagccgatgactctaaggtcgaacagttcttcaagatggtcagctacatttcgggaaattacgacacagatgaaggcttcgacgaattaagaacgcagatcgagaaattcgagaaaagtgccaacgtcgatgtcccacaccgtctcttctatctggccttgccgccaagcgtttttttgacggtggccaagcagatcaagagtcgtgtgtacgcagagaatggcatcacccgtgtaatcgtagagaaacctttcggccacgacctggcctctgccagggagctgcaaaaaaacctggggcccctctttaaagaagaagagttgtacagaattgaccattacttgggtaaagagttggtcaagaatcttttagtcttgaggttcggtaaccagtttttgaatgcctcgtggaatagagacaacattcaaagcgttcagatttcgtttaaagagaggttcggcaccgaaggccgtggcggctatttcgactctataggcataatcagagacgtgatgcagaaccatctgttacaaatcatgactctcttgactatggaaagaccggtgtcttttgacccggaatctattcgtgacgaaaaggttaaggttctaaaggccgtggcccccatcgacacggacgacgtcctcttgggccagtacggtaaatctgaggacgggtctaagcccgcctacgtggatgatgacactgtagacaaggactctaaatgtgtcacttttgcagcaatgactttcaacatcgaaaacgagcgttgggagggcgtccccatcatgatgcgtgccggtaaggctttgaatgagtccaaggtggagatcagactgcagtacaaagcggtcgcatcgggtgtcttcaaagacattccaaataacgaactggtcatcagagtgcagcccgatgccgctgtgtacctaaagtttaatgctaagacccctggtctgtcaaatgctacccaagtcacagatctgaatctaacttacgcaagcaggtaccaagacttttggattccagaggcttacgaggtgttgataagagacgccctactgggtgaccattccaactttgtcagagatgacgaattggatatcagttggggcatattcaccccattactgaagcacatagagcgtccggacggtccaacaccggaaatttacccctacggatcaagaggtccaaagggattgaaggaatatatgcaaaaacacaagtatgttatgcccgaaaagcacccttacgcttggcccgtgactaagccagaagatacgaaggataattag

SEQ ID NO: 58 - protein, 505 aa, Saccharomyces cerevisiae
MSEGPVKFEKNTVISVFGASGDLAKKKTFPALFGLFREGYLDPSTKIFGYARSKLSMEEDLKSRVLPHLKKPHGEADDSKVEQFFKMVSYISGNYDTDEGFDELRTQIEKFEKSANVDVPHRLFYLALPPSVFLTVAKQIKSRVYAENGITRVIVEKPFGHDLASARELQKNLGPLFKEEELYRIDHYLGKELVKNLLVLRFGNQFLNASWNRDNIQSVQISFKERFGTEGRGGYFDSIGIIRDVMQNHLLQIMTLLTMERPVSFDPESIRDEKVKVLKAVAPIDTDDVLLGQYGKSEDGSKPAYVDDDTVDKDSKCVTFAAMTFNIENERWEGVPIMMRAGKALNESKVEIRLQYKAVASGVFKDIPNNELVIRVQPDAAVYLKFNAKTPGLSNATQVTDLNLTYASRYQDFWIPEAYEVLIRDALLGDHSNFVRDDELDISWGIFTPLLKHIERPDGPTPEIYPYGSRGPKGLKEYMQKHKYVMPEKHPYAWPVTKPEDTKDN

SEQ ID NO: 59 - DNA, 1494 bp, Kluyveromyces marxianus
  Kluyveromyces marxianus var. lactis, Candida sphaerica
  CDS (1)..(1494)
atggctactcagtttgacgagaacactgtgatcactatttttggtgcttcaggtgatttatcaaagaagaaaacgtttcctgcattattcgggttatatcgtgaaggatatttgaatccaactacaaaaattattgggtatgcgcgttccaagttgagcaacgaggatttaagagaaaaggtaaagccatttttaaagaaacctaacggagctaaggatgatgctaaagtcaatgaatttttatcgatggtttcttaccatgctggtccgtatgattctgatgaaggttacttggagttgaaaaagattatcgaagagtttgaggctgaaaaaaaggtcgatgaacctcatagactcttttacttagccttgcctcctagtattttcattgacgtgtgttcgaaactaaaggaaaacctatacacagaatctggaattcaaagggttattgtggaaaagccttttggtcacgatctacagtctgctactgaattacaggagaagttggcgccattgttttccgaggacgaattgttcagaattgatcattatttgggtaaagagatggtaaaaaatctattgttgatgagattcggtaacactttcttgaacgccgcttggaacaaagaaaatatacaatctgttcaggtggttttcaaggaaccatttggaactgaaggtcgtggtggttacttcgattcaattggtattataagagatgtgatgcagaatcatttgctacaagtgttaactctattgacgatggaaagaccagtatctttcgacccagaatctgtacgtgacgaaaaggtcaaggttttgaaagcattctctccaattgatcatgacgatatattgataggccaatacggaagatctgtggatggtagcaagcctagctacctagatgatgaaactgtcaaagaggactccaagtgtgtcacctttgcagcaatcggattcaaaattgcaaatgaacgttgggatggagttcccatcgttatgagagcaggaaaagcgttgaacgaaggtaaagtagaaatcagaatccagttcagaagagttgcatctggcatgttcactgatattcctaataatgaattggttattagaattcaaccaaatgaagccatctacttgaagtgtaatgccaaaacacctggtcttgcgaatgaaaaccaaaccacagaactagacttgacttactcagagagatacaaaaactattggattcctgaagcatatgaatctttgataagagatgcccttttaggagatcattcaaatttcgtcagagacgatgaattagacgtaagctggaagctatttactccattgcttaattacttggaaggaccagatggacctcaaccaaagatctatccatatggctgtagaagccctgacggactcgttgagtttttagcagaccatggttacaccttttccaaaccaggatcctaccaatggcctgtcaccactcctaaaatgtaa

SEQ ID NO: 60 - protein, 497 aa, Kluyveromyces marxianus
  Kluyveromyces marxianus var. lactis, Candida sphaerica
MATQFDENTVITIFGASGDLSKKKTFPALFGLYREGYLNPTTKIIGYARSKLSNEDLREKVKPFLKKPNGAKDDAKVNEFLSMVSYHAGPYDSDEGYLELKKIIEEFEAEKKVDEPHRLFYLALPPSIFIDVCSKLKENLYTESGIQRVIVEKPFGHDLQSATELQEKLAPLFSEDELFRIDHYLGKEMVKNLLLMRFGNTFLNAAWNKENIQSVQVVFKEPFGTEGRGGYFDSIGIIRDVMQNHLLQVLTLLTMERPVSFDPESVRDEKVKVLKAFSPIDHDDILIGQYGRSVDGSKPSYLDDETVKEDSKCVTFAAIGFKIANERWDGVPIVMRAGKALNEGKVEIRIQFRRVASGMFTDIPNNELVIRIQPNEAIYLKCNAKTPGLANENQTTELDLTYSERYKNYWIPEAYESLIRDALLGDHSNFVRDDELDVSWKLFTPLLNYLEGPDGPQPKIYPYGCRSPDGLVEFLADHGYTFSKPGSYQWPVTTPKM

SEQ ID NO: 61 - DNA, 2813 bp, Erwinia chrysanthemi
  CDS (322)..(1797)
atcgatgcggattttgtgaaatatactacgagcccgtaacggttggcagaggtcgacacaacaagtcatcagctttttttgtcagaatatgacgtgtgtctaacctttcaaaatagtaactggcctgtcagaaacgatgggaaatttctcttttaggcagatgccagacccgttttcttcatcggcacaataggttctgaggccttgtagtatcggaatcagccgataatgtggttttcttacgggtttactggtttgtgtcaaaaagagtacattattaatgtaataaaattacagcgtcgtgcaatgaggagattgaaaatggcggtaacgtcaacagcccaggcgtgtgacctggttattttcggtgcaaagggcgaccttgcgcgccgcaaattgctgccttcactgtatcaactggaaaaagcaggccatattcatccggaaacccgcattatcggcgtgggacgggcggagtgggaccgagacgcctatatcaaagtggtgcgcgaagcgctggaaacctttctcaaggagccgctcgacccggcattgtggacaaccctgagcaatcggctcgacttttgcaaccttgatgtggaagacaccgagggattcaaacggttgggtacgatgctcgatcagcaaaatcgcaccaccatcaattatttcgccatgccgccgagcaccttcggcgctatctgccgcggtctggggcaggccggcctgaacaaggagccggcacgcgtggtgatggaaaaaccgctgggcaccaatctggcgtcgtcacgggtgatcaacaatcaggtagcggagtttttcaacgaatgtcaggtctaccgcatcgaccactatctcggcaaggaaaccgtgctgaacctgctggcactgcgtttcgccaactccctgttcgccaacaactgggataaccgcactatcgatcacgtgcagattaccgtggcggaagaggtgggtattgaagggcgctgggggtatttcgatcaggccgggcaaatgcgcgacatgatccagaaccacctgttgcagattctgaccatgattgccatgtcgccgccggcggatctgagcaccgatcgcattcgtgatgaaaaggtgaaagtcctgcgttcgctgcgccgtatcgatcgttccaatgtgcatgaagtgacggtccgtgggcagtacaccagcggttttgtgcagggcaagaaagtgccgggctacctggaagaagaaggggccaacaagaccagtaataccgaaaccttcgtggccattcgcgtcgatatcgacgactggcgctggtccggcgtgccgttttatctgcgcaccggcaagcgtctgccgtcaaaatgttcggaagtggtggtctactttaaaaacccggcgctcaacctgttccatgattcctatcagcagttgccgcagaataagctgatcatccgcctgcagccggacgaaggggtagaaattcagattctgaacaagattccggggctggaccacaaacatcggttgcagaccaccaagctcgacctgagcttctcggaaacttttaaccagcaacatctggcggacgcctatgagcgcctgttgctggaaaccatgcgtggtattcaggcgctgttcgtgcgccgcgacgaagtggaagaagcctggaaatgggtggattccattatggatgcctgggcaatggacaatgattcccccaaaccttatcaggccgggacctgggggccggtcgcgtccgtcgccatgattacccgcgatgggcgttcctggaacgaagtggaataagcggttttgccccgtcggcaggcgggcgaagccgttagcgttttttagctgacggtgcggtcggacgtccgtgggtaaccgcggatccctgtggcaggggcgcgccagatcattaatcgatgcccgttgggcatgactggagattaccctcgatgaaaaactggaaaaccagtgcggaacagattctgacagccggtccggttgttcctgtgattgtgattaacaaactggaacacgcggtaccgatggcgaaagccctggtagcgggtggcgtgcgtgtgctggagctgacgctgcgtaccgagtgtgcggtagaggcgattcgcctgatcgcgcaggaagtgccggatgctatcgtcggcgccggtacggtcaccaacccgcaacagctggcggaagtgaccgcagccggtgcgcagtttgccatcagccccggcctgaccgagccgctgctgaaagccgcaacggaaggcactattccattgatcccagggatcagcaccgtatccgaactgatgctggggatggattacggtttgcgcgagtttaaatttttcccggcggaagctaacggcggggtaaaagcgctgcaggcgattgccggtccgttcggcaagattcgtttctgcccgaccggtgggatctcactgaagaattaccgcgactacctggcgctgaagagcgtgctgtgcgtcggcggctcctggctggtgccggccgatgcgctggaaagcggcgattacgatcgcatcacggcgttggcgcgtgaagctgttgccggcgcgacagcctgatcgacgttttaccttattctttctcaagcccgctttcgcgggcttttttgtgctcggtaggcgagccgacaaaccgcgttgtgcctgtttaagcgacatcggtcgtcacaacaaaccgctgtctggaaaccgttgtctggataccattgtctggcgtacgattctggcgttatcgggagagaattcaggctcatgccggcgcatgagcctgatatgacctca

SEQ ID NO: 62 - protein, 491 aa, Erwinia chrysanthemi
MAVTSTAQACDLVIFGAKGDLARRKLLPSLYQLEKAGHIHPETRIIGVGRAEWDRDAYIKVVREALETFLKEPLDPALWTTLSNRLDFCNLDVEDTEGFKRLGTMLDQQNRTTINYFAMPPSTFGAICRGLGQAGLNKEPARVVMEKPLGTNLASSRVINNQVAEFFNECQVYRIDHYLGKETVLNLLALRFANSLFANNWDNRTIDHVQITVAEEVGIEGRWGYFDQAGQMRDMIQNHLLQILTMIAMSPPADLSTDRIRDEKVKVLRSLRRIDRSNVHEVTVRGQYTSGFVQGKKVPGYLEEEGANKTSNTETFVAIRVDIDDWRWSGVPFYLRTGKRLPSKCSEVVVYFKNPALNLFHDSYQQLPQNKLIIRLQPDEGVEIQILNKIPGLDHKHRLQTTKLDLSFSETFNQQHLADAYERLLLETMRGIQALFVRRDEVEEAWKWVDSIMDAWAMDNDSPKPYQAGTWGPVASVAMITRDGRSWNEVE

SEQ ID NO: 63 - DNA, 1645 bp, Aspergillus niger
  CDS (68)..(1600)
cttccctcctccaccgaatctctcacctttccttcccatctcgtggttgttcacacatcagtaaaacatggccagcacaatagcacgcactgaggaacgccagaatgctggcaccatggagctcaaagatgacactgtcatcatagtactgggtgcctccggagatcttgcaaagaagaagaccttcccggcccttttcggcctttatcgcaacaagttcctccccaagggaatcaagatcgtcggatatgcccggacaaacatggaccatgaggagtacctgaggcgtgtgcgctcatacatcaagacccctaccaaggaaatcgaagagcagctggacagcttctgccagttctgcacctacatttccggtcaatatgacaaggatgactcgttcatcaacctcaacaagcacctcgaggagattgagaagggccagaaggagcagaacagaatctactacatggccctcccccccagcgttttcaccaccgtttccgaccaacttaagcgcaactgctaccccaagaacggcgttgcccgtatcatcgtagagaagcctttcggcaaggaccttcagagctcgcgcgatctccaaaaagccctggagcctaactggaaggaagaggagatcttccgtatcgaccactacctgggtaaggagatggtcaagaacatccttatcatgcgcttcggaaacgaattcttcaacgccacctggaaccgtcaccacatcgataacgttcagatcacattcaaggagcccttcggcactgagggacgtggtggttacttcgatgaattcggcatcatccgtgatgtcatgcagaaccaccttctccaggtgttgacgctgctcgctatggagcgccccatttccttctccgccgaggacatccgtgacgagaaggttcgtgtcctccgtgcgatggacgccattgagcccaagaacgtcattattggccagtacggaaagtctctggatggcagcaagcccgcctacaaggaggacgagaccgttccccaggattcccgctgccccaccttctgcgctatggtcgcctacatcaagaacgagaggtgggacggtgttcctttcatcatgaaggctggcaaggccttgaacgagcagaagaccgagatccgtatccagttccgtgacgttacctccggaattttcaaggacatccctcgcaacgagctcgttatccgcgtccagcccaacgagtccgtgtacatcaagatgaactccaagctgcctggcctgtccatgcagacggttgtgactgagctcgacctcacctaccgccgccgcttctccgacctcaagatccccgaagcctacgagtctctgatcctggatgctctgaagggcgaccactccaacttcgtccgtgacgatgagctggatgccagctggaggatcttcacccctctcctgcactacctggatgacaacaaggagatcatccccatggaatacccctacggctcccgcggacccgccgtccttgatgacttcaccgcgtccttcggctacaagttcagcgatgctgctggctaccagtggcccttgacttccacccccaaccgtctgtaaataagggcggtcggcaggttatgacggatgaggatgaaaaaaaaa

SEQ ID NO: 64 - protein, 510 aa, Aspergillus niger
MASTIARTEERQNAGTMELKDDTVIIVLGASGDLAKKKTFPALFGLYRNKFLPKGIKIVGYARTNMDHEEYLRRVRSYIKTPTKEIEEQLDSFCQFCTYISGQYDKDDSFINLNKHLEEIEKGQKEQNRIYYMALPPSVFTTVSDQLKRNCYPKNGVARIIVEKPFGKDLQSSRDLQKALEPNWKEEEIFRIDHYLGKEMVKNILIMRFGNEFFNATWNRHHIDNVQITFKEPFGTEGRGGYFDEFGIIRDVMQNHLLQVLTLLAMERPISFSAEDIRDEKVRVLRAMDAIEPKNVIIGQYGKSLDGSKPAYKEDETVPQDSRCPTFCAMVAYIKNERWDGVPFIMKAGKALNEQKTEIRIQFRDVTSGIFKDIPRNELVIRVQPNESVYIKMNSKLPGLSMQTVVTELDLTYRRRFSDLKIPEAYESLILDALKGDHSNFVRDDELDASWRIFTPLLHYLDDNKEIIPMEYPYGSRGPAVLDDFTASFGYKFSDAAGYQWPLTSTPNRL

SEQ ID NO: 65 - DNA, 1785 bp, Medicago sativa
  Medicago sativa (alfalfa)
  CDS (38)..(1585)
ccaccagatataattaagtagatcagagtagaagaagatgggaacaaatgaatggcatgtagaaagaagagatagcataggtactgaatctcctgtagcaagagaggtacttgaaactggcacactctctattgttgtgcttggtgcttctggtgatcttgccaagaagaagacttttcctgcactttttcacttatataaacaggaattgttgccacctgatgaagttcacatttttggctatgcaaggtcaaagatctccgatgatgaattgagaaacaaattgcgtagctatcttgttccagagaaaggtgcttctcctaaacagttagatgatgtatcaaagtttttacaattggttaaatatgtaagtggcccttatgattctgaagatggatttcgcttgttggataaagagatttcagagcatgaatatttgaaaaatagtaaagagggttcatctcggaggcttttctatcttgcacttcctccttcagtgtatccatccgtttgcaagatgatcaaaacttgttgcatgaataaatctgatcttggtggatggacacgcgttgttgttgagaaaccctttggtagggatctagaatctgcagaagaactcagtactcagattggagagttatttgaagaaccacagatttatcgtattgatcactatttaggaaaggaactagtgcaaaacatgttagtacttcgttttgcaaatcggttcttcttgcctctgtggaaccacaaccacattgacaatgtgcagatagtatttagagaggattttggaactgatggtcgtggtggatattttgaccaatatggaattatccgagatatcattccaaaccatctgttgcaggttctttgcttgattgctatggaaaaacccgtttctctcaagcctgagcacattcgagatgagaaagtgaaggttcttgaatcagtactccctattagagatgatgaagttgttcttggacaatatgaaggctatacagatgacccaactgtaccggacgattcaaacaccccgacttttgcaactactattctgcggatacacaatgaaagatgggaaggtgttcctttcattgtgaaagcagggaaggccctaaattctaggaaggcagagattcgggttcaattcaaggatgttcctggtgacattttcaggagtaaaaagcaagggagaaacgagtttgttatccgcctacaaccttcagaagctatttacatgaagcttacggtcaagcaacctggactggaaatgtctgcagttcaaagtgaactagacttgtcatatgggcaacgatatcaagggataaccattccagaggcttatgagcgtctaattctcgacacaattagaggtgatcaacaacattttgttcgcagagacgaattaaaggcatcatggcaaatattcacaccacttttacacaaaattgatagaggggagttgaagccggttccttacaacccgggaagtagaggtcctgcagaagcagatgagttattagaaaaagctggatatgttcaaacacccggttatatatggattcctcctaccttatagagtgaccaaatttcataataaaacaaggattaggattatcaggagcttataaataagtcttcaataagcttgtgaaattttcgttataatctctctcattttggggtgtatatcaagcatttaagcgcgtgtttgacacagtttgtgtaatagatttggctctgaatgaaaataaacgggaattgtttctttttgtttta

SEQ ID NO: 66 - protein, 515 aa, Medicago sativa
  Medicago sativa (alfalfa)
MGTNEWHVERRDSIGTESPVAREVLETGTLSIVVLGASGDLAKKKTFPALFHLYKQELLPPDEVHIFGYARSKISDDELRNKLRSYLVPEKGASPKQLDDVSKFLQLVKYVSGPYDSEDGFRLLDKEISEHEYLKNSKEGSSRRLFYLALPPSVYPSVCKMIKTCCMNKSDLGGWTRVVVEKPFGRDLESAEELSTQIGELFEEPQIYRIDHYLGKELVQNMLVLRFANRFFLPLWNHNHIDNVQIVFREDFGTDGRGGYFDQYGIIRDIIPNHLLQVLCLIAMEKPVSLKPEHIRDEKVKVLESVLPIRDDEVVLGQYEGYTDDPTVPDDSNTPTFATTILRIHNERWEGVPFIVKAGKALNSRKAEIRVQFKDVPGDIFRSKKQGRNEFVIRLQPSEAIYMKLTVKQPGLEMSAVQSELDLSYGQRYQGITIPEAYERLILDTIRGDQQHFVRRDELKASWQIFTPLLHKIDRGELKPVPYNPGSRGPAEADELLEKAGYVQTPGYIWIPPTL

SEQ ID NO: 67 - DNA, 1689 bp, Solanum tuberosum
  Solanum tuberosum (potato)
  CDS (46)..(1581)
gatcacaactcacaaggctgaattgagttcaagctggttgtcaagatggcggcatcatggtgtattgagaaaaggggttctattaggaatgactcttttagagacaatgataatatacctgaaactgggtgtctttctattattgttcttggtgcttctggtgatcttgccaagaagaaaacttttcctgctctcttcaacctctaccgccagggatttcttcaatccaatgaagttcacatttttggctacgcaaggacaaaaatttctgatgatgacttgagaagccgtatccgtgggtatctttctcaggggaaagaaaatgaaggagaagtatcagagtttctgcaactgattaaatacgtcagtggttcttatgattctgctgagggatttacgtcactggataaggcaatatctgagcacgaattctcaaaaaatagcacagaaggatcatccagaagactcttctattttgctcttcctccatcagtatatccctctgtttgcagaatgataaaaagttattgtatgaacaaatctgatcttggtggttggacacggactgttgttgagaagcccttcggcaaggatttagcttcatctgaacaactaagttcccagatcggagaactatttgacgaaccccaaatttatcgcattgaccattatttggggaaggagttggttcagaatttgttggtgctgcgttttgcaaatcgcttctttttgccgctctggaatcgtgacaacattgataatatacagattgtctttagagaggactttggaactgagggccgcggtggatattttgatgaatatgggattatacgtgacattattcagaaccatctattgcaggtcctttgccttgttgccatggagaagcctgtttctcagaagcccgaacacattcgggacgagaaagttaaggttcttcaatcaatgcttccaattgaagatgaagaggttgttcttggacaatatgaaggctataaggatgatccaacggttcctaacaactcaaatactcctacttttgctactatggttttacgcatacacaatgaaagatgggaaggtgtcccctttataatgaaggctggaaaagcactaaattcaagaaaggcagaaatacgagtgcagtttaaggatgttcctggtgatatatttagatgtcaaaagcaggggagaaatgagtttgtgatacgcctccaaccttcagaagccatgtacatgaagcttacggtcaagaaacctgggcttgaaatgtcaactgttcaaagtgaattagacctgtcgtatgggcagcgttaccaaggggtcgtcattccagaggcttatgaacgtctgattctcgacacaataagaggggatcagcagcattttgtgcgtagggatgagctcaaggcggcttgggagatttttacccctcttttgcatagaattgacaatggagaggtgaagccaattccatacaagccaggcagcagaggccctgctgaagcagatgagttgttgcaaaatgccggttacgttcaaactcatggctatatatggatccctcccacactataagtttggaaaagtattgcagatgagtgttaccttgtcacttttgccatgtagtaccctgcctatgtgcaaacttattgagaagtaacaaatagtccgtgtatcacaaat

SEQ ID NO: 68 - protein, 511 aa, Solanum tuberosum
  Solanum tuberosum (potato)
MAASWCIEKRGSIRNDSFRDNDNIPETGCLSIIVLGASGDLAKKKTFPALFNLYRQGFLQSNEVHIFGYARTKISDDDLRSRIRGYLSQGKENEGEVSEFLQLIKYVSGSYDSAEGFTSLDKAISEHEFSKNSTEGSSRRLFYFALPPSVYPSVCRMIKSYCMNKSDLGGWTRTVVEKPFGKDLASSEQLSSQIGELFDEPQIYRIDHYLGKELVQNLLVLRFANRFFLPLWNRDNIDNIQIVFREDFGTEGRGGYFDEYGIIRDIIQNHLLQVLCLVAMEKPVSQKPEHIRDEKVKVLQSMLPIEDEEVVLGQYEGYKDDPTVPNNSNTPTFATMVLRIHNERWEGVPFIMKAGKALNSRKAEIRVQFKDVPGDIFRCQKQGRNEFVIRLQPSEAMYMKLTVKKPGLEMSTVQSELDLSYGQRYQGVVIPEAYERLILDTIRGDQQHFVRRDELKAAWEIFTPLLHRIDNGEVKPIPYKPGSRGPAEADELLQNAGYVQTHGYIWIPPTL

SEQ ID NO: 69 - DNA, 1530 bp, Synechocystis sp.
  CDS (1)..(1530)
atggtaacgctactcgaaaatcccttccgcactggactccgtcaagaacgcactccagaacccctcattttgaccatttttggtgcatccggggaccttacccaacggaaattggtgccagccatctaccaaatgaaacgagagcgccgcttgcctccagagttaacggtggtcggttttgcgagaagggactggagccacgaccattttcgtgagcagatgcgtaagggcatcgaagaattttccaccggcattggcagtgaagacctgtggaatgagtttgcccagggtttattctactgctctggcaatatggatgacccagaaagctatctcaaattgaaaaacttcctgggggaattggatgaaaaacgtaacaccagaggcaatcgagtcttttatttagctgtttcccccaacttctttcccccgggtattaaacaattgggggcagcgggtatgctgagtgacccggttaaaagtcgcattgtgatcgaaaagccctttggtcgggatttgagttcagcccaaagcttgaaccgggtagtgcagagtgtctgcaaagaaaatcaggtgtatcgcatcgatcattacctgggcaaagaaacggtgcaaaatctgatggtgttccgctttgccaacgctatttttgagccactgtggaaccgtcagtttgttgatcatgtgcaaattaccgtagcagaaacggtaggggtagaagaacgagccggttattacgaatccgccggggctttacgagatatggtgcagaatcacctcatgcaactgttttgtctcaccgccatggacccccccaatgccattgacgcggacagcattcgcaacgaaaaggttaaagtgttgcaggctacccgtttagcggatattaataatttggaaaatgccggtatccggggccaatataaagctggttggatgggaggcaaaccagtgccgggttatcgagaagaaccgggggtagatccaagttccaccactcctacctttgcggccctcaaactgatggtggataactggcgttggcagggggtgcccttctatctacgcacgggtaagcgcatgcctaaaaaagtgagtgaaatcgcaattcaattccggcaagtacctctgttaatttttcaatcggtggcccaccaagctaatcccaatgtgttgagtctaagaattcagcccaacgaaggcatttccctgcgttttgaggcaaaaatgcccggttcagaactgcgtacccgcactgtagatatggattttagttatggttcatcctttggagtggccgcagcggatgcctatcaccgccttttattagattgtatgttgggagaccaaaccctgttcacaagagccgacgaggtagaagaagcttggcgagtagtaactccggtgttgtcggcttgggatgcccccagtgatcctctttccatgcccttgtacgaagctggaacctgggaaccagcggaggcagaatggttaattaataaagatggccgtcgctggcgccgactttag

SEQ ID NO: 70 - protein, 509 aa, Synechocystis sp.
MVTLLENPFRTGLRQERTPEPLILTIFGASGDLTQRKLVPAIYQMKRERRLPPELTVVGFARRDWSHDHFREQMRKGIEEFSTGIGSEDLWNEFAQGLFYCSGNMDDPESYLKLKNFLGELDEKRNTRGNRVFYLAVSPNFFPPGIKQLGAAGMLSDPVKSRIVIEKPFGRDLSSAQSLNRVVQSVCKENQVYRIDHYLGKETVQNLMVFRFANAIFEPLWNRQFVDHVQITVAETVGVEERAGYYESAGALRDMVQNHLMQLFCLTAMDPPNAIDADSIRNEKVKVLQATRLADINNLENAGIRGQYKAGWMGGKPVPGYREEPGVDPSSTTPTFAALKLMVDNWRWQGVPFYLRTGKRMPKKVSEIAIQFRQVPLLIFQSVAHQANPNVLSLRIQPNEGISLRFEAKMPGSELRTRTVDMDFSYGSSFGVAAADAYHRLLLDCMLGDQTLFTRADEVEEAWRVVTPVLSAWDAPSDPLSMPLYEAGTWEPAEAEWLINKDGRRWRRL

SEQ ID NO: 71 - DNA, 2047 bp, Arabidopsis thaliana
  Arabidopsis thaliana (mouse-ear cress)
  CDS (51)..(1850)
gtttgcatccaaatccaattcataactcacactcgtctcaaattcgaaaaatgtcgtctctctcctgccctacctaccgctcccgcacttcgtcttcgtctcctttcttgtcgaatcatcatcattcttcgctgatcaatgttgttgacccacgccgctcactctccttccactacgcttctcctcaggggcttaatctagctgagctctgtgttgttagatcgcagaggaggtccgttcagagttctgttgtcgtgcaagatggatcagtagccaccgagtcaagctcgtccgaggaggcgaaagatgtaggggtgttaacgattccttcacttgaagctgacaaggttgtagcagagtctgatggcggtgaacaactttcaacagttagtatcacggtggtgggagcttctggtgatcttgccaagaagaaaatattcccagctcttttcgcactttactatgaaggctgtcttcctgagcattttaccatttttggctatgcaaggagtaagatgacagatgctgaacttagagttatggtcagcaaaacattgacatgtagaattgataagagggcaaactgcggtgaaaagatggaagagtttctcaagagatgtttttaccattcgggtcagtatgattctcaggaacattttgttgcattggacgagaagctcaaggagcatgagggtggaagactttcgaaccgtcttttctatctttcaatccctccaaatatctttgttgacgcggtgaaatgtgcaagctcatctgcttcatctgtcaatggatggactagggtcattgtcgagaaaccttttggccgggactccaaaacctcggctgcattaacaaagtctcttaagcagtacctggaggaagaccaaatatttaggatagaccattacttagggaaggagctggttgagaacttgtcggttcttcgattctcaaatcttatatttgaaccgctatggtcaaggcagtatataaggaacgtgcaattcattttttctgaggatttcggcactgaaggacgcggagggtacttcgacaattacggaataataagagatataatgcagaatcatctgcttcagatattagctcttttcgccatggaaacacctgtgagtttggatgcagaggatatcagaaatgaaaaggtaaaggtactacgttcaatgagaccaataaaacttgaagatgtggtgataggacagtacaagagccacagcataggaggagtcacttatccaagctatactgatgataaaactgtgccaaaaggtagtctgaccccgacatttgcagctgctgcactcttcatcgacaatgcaagatgggatggtgtaccttttctaatgaaagctgggaaagcactaaacacccgaagtgcggagataagagtccagttcaggcatgtgcctggaaatttatataaccggaattctggtactgatcgtgatcagaccacaaatgagcttgtcatccgcgtccaacctgatgaagctatctatttgaaaatcaacaacaaggtccctggtttaggaatgagattagatcagagtaacttaaatcttctctattcagcaaggtattcaaaggagattccagatgcatatgagaggcttttgttagatgcgatcgaaggtgaacgcagattgttcataagaagcgatgaacttgacgctgcttgggcgcttttcactccattgctcaaagagatagaagaaaagaagacaaccccagaattctatccttacggcagtcgtggtccagtcggtgcccattatctagccgcaaaacacaaggtccaatggggagacctaagtcttgatcagtgaaagagtggaagaacattttttgttcatagattcacgtcttagaattttcattatttgtgtggtttatggaaactttctttcgctttcagagataggagtgagttttgttcgattttgtatctggaataataagtaagaactaccctattcttgccaccctttttgctttcaataaaggaaacacaaatttaagtgta

SEQ ID NO: 72 - protein, 599 aa, Arabidopsis thaliana
  Arabidopsis thaliana (mouse-ear cress)
MSSLSCPTYRSRTSSSSPFLSNHHHSSLINVVDPRRSLSFHYASPQGLNLAELCVVRSQRRSVQSSVVVQDGSVATESSSSEEAKDVGVLTIPSLEADKVVAESDGGEQLSTVSITVVGASGDLAKKKIFPALFALYYEGCLPEHFTIFGYARSKMTDAELRVMVSKTLTCRIDKRANCGEKMEEFLKRCFYHSGQYDSQEHFVALDEKLKEHEGGRLSNRLFYLSIPPNIFVDAVKCASSSASSVNGWTRVIVEKPFGRDSKTSAALTKSLKQYLEEDQIFRIDHYLGKELVENLSVLRFSNLIFEPLWSRQYIRNVQFIFSEDFGTEGRGGYFDNYGIIRDIMQNHLLQILALFAMETPVSLDAEDIRNEKVKVLRSMRPIKLEDVVIGQYKSHSIGGVTYPSYTDDKTVPKGSLTPTFAAAALFIDNARWDGVPFLMKAGKALNTRSAEIRVQFRHVPGNLYNRNSGTDRDQTTNELVIRVQPDEAIYLKINNKVPGLGMRLDQSNLNLLYSARYSKEIPDAYERLLLDAIEGERRLFIRSDELDAAWALFTPLLKEIEEKKTTPEFYPYGSRGPVGAHYLAAKHKVQWGDLSLDQ

SEQ ID NO: 73 - DNA, 1953 bp, Nicotiana tabacum
  Nicotiana tabacum (common tobacco)
  CDS (43)..(1824)
gtagatacagattcttcatagagaagtgaagaaatcaagaaaatggtgaccctttattcttctccttcaacccattcttctgggccagttgcttcttactctaattcctctattgggctctataattatcatcataataagcagatagcagtttcttcaattttgtcgagaaagtttggttctttgcaaattaatcagaagccattttggaatgccgttcgcatgcaagatggtgcagtagcgactccgcctagcaaaatcgaaaatgagactcctttgaagaaattaaaaaatggaattttgccagtcgcacctccaaaggagcagaaagatacaattgatttcgacagcaacaaagctaaatcaactgtcagtattactgttgttggtgcttcaggagatcttgccaagaaaaagatatttcctgcactgtttgcactttattatgagggttgcctccctgagcatttcactatctttggctatgcccggagtaagatgactgatgctgaactacggaacatggttagcaagacccttacttgcaggattgacaagagggaaaattgtggtgaaaagatggaacagtttttagaaaggtgcttctaccacagcggccaatacgattccctggaaaactttgcggagctcgataaaaagctgaaggaacatgaggctggaaggttttccaatcgtctattctacttatccattccaccaaatatttttataaatgcggttcgatgtgctagcctctctgcatcatctgctcatggctggacaagagtcattgtagagaaaccctttggtcgggattctgaatcctctgctgcattgacaagatcacttaagcagtacttgaatgaagaccaaatttttaggatcgatcactatttagggaaggagcttgtggaaaacctttctgtccttcgtttctccaacttgatatttgaacccttgtggtcaaggcagtgtataaggaatgtgcagtttattttctcagaagattttggcactgaaggacggggaggttattttgatcattatgggataatcagagacatcatgcaaaaccatctgcttcaaattctggccctctttgccatggaaacacctgtgagtttggatgcggaagatatcagaaatgaaaaggtaaaagttctgcgttccatgagacctttacaactagacgatgttatcattgggcagtacaaatgtcacacaaaaggagatgttacctatcccggttatactgacgacaagactgtaccgaaggacagtctaaccccaacttttgctgcagctgctcttttcatagataatgcacgatgggatggggtgcctttccttatgaaagctgggaaagctttacatactaggagtgcggaaataagagtacaattcaggcacgtaccaggaaatttatacaataagaactttggctcagatcttgaccaggcgaccaacgagcttgttatccgtgtccagcctaatgaagctatatacctaaagatcaataacaaagttcctggtctaggaatgagattggatcgcagtaatcttaatcttctttactcggcaagatactcgaaggagatccctgatgcatatgagcggctgcttcttgatgctatagaaggtgaaaggcggcttttcatccgcagtgatgagctggatgctgcttggtctcttttcactccagtgttaaaagaacttgaggataagaaaatagttccagaatattacccctatggaagtcgaggacctattggagcacattatctcgcagcacgatataaagtaagatggggtgatcttgtgtagacaagtgatttccagactttgctatcactgtcagaaaaccatatgtcgcctttctacttcttgagcttagtatgtcgcaaccaaatttgttgtactgcaattctagaaccaagactagcaaagcgtgaa

SEQ ID NO: 74 - protein, 593 aa, Nicotiana tabacum
  Nicotiana tabacum (common tobacco)
MVTLYSSPSTHSSGPVASYSNSSIGLYNYHHNKQIAVSSILSRKFGSLQINQKPFWNAVRMQDGAVATPPSKIENETPLKKLKNGILPVAPPKEQKDTIDFDSNKAKSTVSITVVGASGDLAKKKIFPALFALYYEGCLPEHFTIFGYARSKMTDAELRNMVSKTLTCRIDKRENCGEKMEQFLERCFYHSGQYDSLENFAELDKKLKEHEAGRFSNRLFYLSIPPNIFINAVRCASLSASSAHGWTRVIVEKPFGRDSESSAALTRSLKQYLNEDQIFRIDHYLGKELVENLSVLRFSNLIFEPLWSRQCIRNVQFIFSEDFGTEGRGGYFDHYGIIRDIMQNHLLQILALFAMETPVSLDAEDIRNEKVKVLRSMRPLQLDDVIIGQYKCHTKGDVTYPGYTDDKTVPKDSLTPTFAAAALFIDNARWDGVPFLMKAGKALHTRSAEIRVQFRHVPGNLYNKNFGSDLDQATNELVIRVQPNEAIYLKINNKVPGLGMRLDRSNLNLLYSARYSKEIPDAYERLLLDAIEGERRLFIRSDELDAAWSLFTPVLKELEDKKIVPEYYPYGSRGPIGAHYLAARYKVRWGDLV

SEQ ID NO: 75 - DNA, 1869 bp, Nicotiana tabacum
  Nicotiana tabacum (common tobacco)
  CDS (22)..(1788)
cggatcggccgaaaaaactgcatgggtgggcagttgcaattgaatccttgttcttcatcttcagttgctactactttccataatggggcacataagttttgcagaaattttaatattttaccatttaaagcccattcccttgaatcttcagttgctagtactttccataatggaatttattcaagaatccagccaagaaagcattttgagatcatgtcatcaaatggttttcatctgaatgctgtgtctttgctggatggttcggcgtcaaaatctatgccagaacaagtgcctttgacagagttagaaaatgcagagacaactgtcagcataactgttattggagcttcaggtgacctagccaagaagaagattttcacagctttatttgctcttttctatgaagattgtttgcctgagaattttatagtttttggttattcacgaacaaaaatgagtgatgaagagctgagaaacatgatcagcaagaccttaacttgtagaattgatcagagagagaattgcgaggctaaaatggaccactttctggaaagatgcttttaccactccggtcagtaccattctgaggatgattttgcagaactggattacaaattaaaggcaaaggaggggtctagggtttctaataggttgttttacttatcaatacctccaaatatattcgtggatgtggtgagatgtgcaagtcttaaagcttcttcaacaagtgggtggacaagagtcattgttgagaaaccgtttggtcgtgacttagaatcatctagtgagctgaccagatgcctaaagaagtatctaactgaggagcaaatattccgaattgaccattacttgggaaaggaacttgttgagaatctctcagttcttcgtttctcgaatcttgtctttgagcctctctggtccagaaactacatacgcaatgtccaattcatattttccgaggactctggtaccgagggacgaggagggtactttgacaattacgggatcatccgagatataatgcaaaatcatctccttcaaatattagcattgtttgctatggaaacacctgtcagcatggatgccgaggacatcagaaatgaaaaggttaaagttttaaggtcaatgaggccattgcagcttgaagatgtggtacttggccagtataaaggtcatagcaagggtggtaaattatatccagcttatacagacgatccaactgtgccaaacggtagtgtcactccaacgttttctgctgctgcactctttattaataatgcacgctgggacggcgttcctttcctcatgaaagctggaaaagctctccatactaggagggcggagatcagggtacagttcagacatgttcctggaaatttgtacaaaaggaactttggaactgatctagataaggccacaaatgagctagttctgcgcttacaacctgatgaagccatatatctgaagatcaacaacaaggttcctggtcttggaatgagacttgaccggagtgaccttaatcttctttacaaagcaaagtatcgaggtgaaataccagatgcatatgagcggcttctgttagatgcaatagaaggagagcgaagattgttcattagaagtgatgagctggatgctgcatgggctctatttacaccattgctgaaggagctagaagagaagaagattgcgccagagctttatccgtatggcagtaggggtccagtaggagcacattatctagctgcaaagcacaacgttcgttggggagatctgtctggtgatgattgatgtatccgacacatcttctccccaaaattggagcgcgaactttcaaaaatattgactataaatgtatgaatattgaggagg

SEQ ID NO: 76 - protein, 588 aa, Nicotiana tabacum
  Nicotiana tabacum (common tobacco)
MGGQLQLNPCSSSSVATTFHNGAHKFCRNFNILPFKAHSLESSVASTFHNGIYSRIQPRKHFEIMSSNGFHLNAVSLLDGSASKSMPEQVPLTELENAETTVSITVIGASGDLAKKKIFTALFALFYEDCLPENFIVFGYSRTKMSDEELRNMISKTLTCRIDQRENCEAKMDHFLERCFYHSGQYHSEDDFAELDYKLKAKEGSRVSNRLFYLSIPPNIFVDVVRCASLKASSTSGWTRVIVEKPFGRDLESSSELTRCLKKYLTEEQIFRIDHYLGKELVENLSVLRFSNLVFEPLWSRNYIRNVQFIFSEDSGTEGRGGYFDNYGIIRDIMQNHLLQILALFAMETPVSMDAEDIRNEKVKVLRSMRPLQLEDVVLGQYKGHSKGGKLYPAYTDDPTVPNGSVTPTFSAAALFINNARWDGVPFLMKAGKALHTRRAEIRVQFRHVPGNLYKRNFGTDLDKATNELVLRLQPDEAIYLKINNKVPGLGMRLDRSDLNLLYKAKYRGEIPDAYERLLLDAIEGERRLFIRSDELDAAWALFTPLLKELEEKKIAPELYPYGSRGPVGAHYLAAKHNVRWGDLSGDD

SEQ ID NO: 77 - DNA, 2058 bp, Solanum tuberosum
  Solanum tuberosum (potato)
  CDS (41)..(1774)
aagaaaactcattcttgaaaaaaggcatttctctgtctgtatgggtgtgcaattgagattgaacccttgttcttcatcttcagctgcaacttctccttcaactttccataatgggacaccatatttctgcaaaaagtttaactttttaccatttagaacccaacccctcaattgggtatctggaatttactcaagaatccaaccaagaaagcattttgaagtcttttcctcaaatgggtttccacttaatgctgtgtctgtgcaagatgtacaagtgcctttgacagagttaggaagtggagataccactgtcagcataactgttattggagcttcaggtgacctagccaagaagaagattttaccagctttatttgctcttttctatgaagattgtctgcctgagaattttgtagtttttggctactcacgaacaaaattgagtgatgaagagctgagaaatatgatcagtacaaccttaacttgtcgaattgataagagagagaattgcgatgccaaaatggagcattttctggaaagatgcttttatcattcgggtcagtacaattctgaggatgattttgcagaactggattacaaattaaaggaaaaggagggttgtagggtttctaataggttgttttacttatcaatacctccaaatatattcgtggatgtggtgcgatgtgcaagtcttaaagcttcttcaacaagtgggtggacaagggtcattgttgagaaaccatttggtcgtgatttagaatcatctagtgagctgaccagatccctaaagaagtacctaactgaggagcaaattttccgaattgaccattacttgggaaaggaacttgttgagaatctctcagttcttcggttctcgaatcttgtctttgagcctctttggtccagaaactacatccgcaatgtccaatttatattttccgaagattttggtaccgagggacgaggagggtactttgaccactacggcatcatccgtgatattatgcaaaatcatctccttcaaatattagcattgtttgctatggaaacacctgtcagcttggatgctgaggacatcagaaatgagaaggttaaagttttaaggtcaatgaggccattgcaacttgaagatgttgttcttggacagtataagggtcatagcaatggtgctaaatcatatccagcttacacagatgatccaactgtgccaaatggcagtatcactccaacattttctgctgctgcactcttcattgataatgcacgttgggacggggttcctttcctcatgaaagcaggaaaagctctccatacgaagagggcagagatcagggtccagttcagacatgttcccggaaatttgtacaaaaggaactttggaactgacatggataaagcaaccaatgagctagttctgcgcctacaacctgatgaagccatatatctgaaaattaacaacaaggtccctggtcttgggatgagacttgaccggagtgaccttaatcttctttataaagcaaagtatcgaggtgaaataccagatgcatatgagcggcttttgttagatgcaatagaaggagagcgaagattgttcataagaagcgatgaacttgatgctgcatgggctctatttacaccgttgctgaaggagctggaagagaagaagattgcaccagagctttatccatacggaagtagggggccagtgggagcacattatctagctgcaaagcacaacgttcgttggggagatctatctggtgatgattgattgtatgtgagatcttcttgaggagtactatgaaatggaggaaatctctaatttcctcacaaagggggacaattgatattcatttagttttataggaattgatctacttgctgtttcagctcatcaagaatgcaaaaattatggacaacttggaactgctgtcagcaattgttgtatagctagcttgtctattttgttaagaaaatactcatgttttattcttcttgttgtgttacatcctgggctatattttgctaatgactaataatataccctactcttca

SEQ ID NO: 78 - protein, 577 aa, Solanum tuberosum
  Solanum tuberosum (potato)
MGVQLRLNPCSSSSAATSPSTFHNGTPYFCKKFNFLPFRTQPLNWVSGIYSRIQPRKHFEVFSSNGFPLNAVSVQDVQVPLTELGSGDTTVSITVIGASGDLAKKKILPALFALFYEDCLPENFVVFGYSRTKLSDEELRNMISTTLTCRIDKRENCDAKMEHFLERCFYHSGQYNSEDDFAELDYKLKEKEGCRVSNRLFYLSIPPNIFVDVVRCASLKASSTSGWTRVIVEKPFGRDLESSSELTRSLKKYLTEEQIFRIDHYLGKELVENLSVLRFSNLVFEPLWSRNYIRNVQFIFSEDFGTEGRGGYFDHYGIIRDIMQNHLLQILALFAMETPVSLDAEDIRNEKVKVLRSMRPLQLEDVVLGQYKGHSNGAKSYPAYTDDPTVPNGSITPTFSAAALFIDNARWDGVPFLMKAGKALHTKRAEIRVQFRHVPGNLYKRNFGTDMDKATNELVLRLQPDEAIYLKINNKVPGLGMRLDRSDLNLLYKAKYRGEIPDAYERLLLDAIEGERRLFIRSDELDAAWALFTPLLKELEEKKIAPELYPYGSRGPVGAHYLAAKHNVRWGDLSGDD

SEQ ID NO: 79 - DNA, 2049 bp, Spinacia oleracea
  Spinacia oleracea (spinach)
  CDS (147)..(1871)
taaaattctaaactaggattttttttttctttttccatttaaatttcttctgcttaaaaacttccattttcggcaacccaattacatggctaagcatttgagtttgagcgcttgttcgtcttttttagcagcagtcaaaattaaggatggaggaacttgtttcttgccaccatcttccattattatgcctccaaagctctgttcctccaaatgggtgtctcacattctttcaagattctgcctgccaaaggtgttcccattctgaattttcaaatgggcatcctttaaatgatgtctctcttcaaaatgatgtggctgtaaacccaattgttgcaaaaagtattgatccgtcagcagatcttcagttgcttcccctattggagtccgtcaaagaagagcccacactgagcataattgtagttggtgcctcaggagatcttgccaaaaagaagatatttcctgccctttttgctctcttttatgaaaactgtcttcctgagaacttcacagtctttggtttttcacgaacggaaatgaatgatgaagagctgcggactatgatcagtaaaaccttaacctgtagaatagaccagagggaaaactgtggtgaaaaaatggatcattttttgcaaagatgcttttaccattctggtcagtataattctgaggatgacttttcaggattggactgtaagcttaaagaaaaagaggctggtagactgcaaaataggctattctacctttcaataccaccaaacatttttgtggatgtggtgagatgtgttagccatcgagcttcttctgcaagtggatggacaagggttatagtagaaaagccttttggacgtgactcggattcttctcgtgagctaactagaagcttcaagcagtacttgagcgaggaccagatattcaggattgaccattacttggggaaggagttggtggagaatttatctgttctacgcttttcaaatctagtttttgaacctctatggtcaaggaactacatccgaaatgtccagctgatattctctgaagattttggtacagagggacgagggggatactttgataattatggaataatccgagatataatgcaaaaccatcttcttcaaattctagccttgtttgcaatggagacacctgttagcttagatgctgaggacattaggaatgaaaaggtgaaagtgcttaggtcaatgaaaccacttaaactgcaagatgtggtagtgggtcagtacaagggtcacagcaaagggaacaaatcatattctggttacacagatgatccaacggtgccaaacaatagtgtgactccaacatttgcagctgcagcgttgttcatcgacaatgctcgatgggatggagttcctttcctgatgaaagctggaaaagctcttcatacgaagagagctgaaatccgagtgcagtttagacatgttcctggaaacttgtacaagaaaacttttgggacggatttggacaaagctacgaatgagcttgtactacgggtacaacctgatgaagcaatatacttgaagatcaataacaaggttcctggccttgggatgagattggaccgtactgaccttaatttgtgttacagtactaggtaccggggagaaatacctgacgcgtatgagaggctacttctggacgcaatagaaggagagcgtagattgttcatcagaagtgataaactggatgcggcttggtcattgttcacgccgttgttaaaggaactagaggagaaaaaggtagcaccagagctgtacccttacggtagcaggggaccagtcggagctcattatcttgccgccaagcacaatgtccggtggggggatcttagtggtgaagactcgtgagggctttgttgatactgattcacatatacactttcaagatcacttccatgtatgatttgtattgtgaaaatccaaggtatatatatttttcatgtacaacaacctcctactaaagcaatgttgatgcttctgcaattcacactgtagatcttttttaatataaattttacagaaaatt

SEQ ID NO: 80 - protein, 574 aa, Spinacia oleracea
  Spinacia oleracea (spinach)
MEELVSCHHLPLLCLQSSVPPNGCLTFFQDSACQRCSHSEFSNGHPLNDVSLQNDVAVNPIVAKSIDPSADLQLLPLLESVKEEPTLSIIVVGASGDLAKKKIFPALFALFYENCLPENFTVFGFSRTEMNDEELRTMISKTLTCRIDQRENCGEKMDHFLQRCFYHSGQYNSEDDFSGLDCKLKEKEAGRLQNRLFYLSIPPNIFVDVVRCVSHRASSASGWTRVIVEKPFGRDSDSSRELTRSFKQYLSEDQIFRIDHYLGKELVENLSVLRFSNLVFEPLWSRNYIRNVQLIFSEDFGTEGRGGYFDNYGIIRDIMQNHLLQILALFAMETPVSLDAEDIRNEKVKVLRSMKPLKLQDVVVGQYKGHSKGNKSYSGYTDDPTVPNNSVTPTFAAAALFIDNARWDGVPFLMKAGKALHTKRAEIRVQFRHVPGNLYKKTFGTDLDKATNELVLRVQPDEAIYLKINNKVPGLGMRLDRTDLNLCYSTRYRGEIPDAYERLLLDAIEGERRLFIRSDKLDAAWSLFTPLLKELEEKKVAPELYPYGSRGPVGAHYLAAKHNVRWGDLSGEDS

SEQ ID NO: 81 - DNA, 2359 bp, Petroselinum crispum
  Petroselinum crispum (parsley)
  CDS (172)..(1986)
gaagaggaaggcagcctttcggagataccaaaggactcaaccccctcgaactctccgaagtattttagtcccccctgtgtcttctcaacccccccaatactcctctttcattttcagttttgatacaacaactaatcatttgagattggattacattgtttcacacaacaaatggccaccctttcttcagctaccaattgtcgctcctcctcctcctcctcctattcctcttcatcttctctctttccaaggattcatcatcaacaacacttcatcgtttcgttggcttctcccaaacctctattcaacaagctttctttccattccaatcaaccttctttttccttcactcctgctcctgctcctgctgctgcatcccaagatggtgcaatatccacaacggtgccacatattgaaaatgaaactccactcaagaaagtcaagaatgcaaatttatcagttccaccccctcaggagtccaaaggcattactccttttcgtctcaacaaagacaagtcctctgtcactatcactgtcgtcggagcttctggggacctggccaagaagaagatatttcctgcactttttgcactttattacgaggactgcctacctgagcacttcacaatttttggttatgcccgaagtaagatgactgatgctgaacttagggacatggtgagcaagaccctcacttgcaggattgataagagggcaaactgtggggaaaagatggaacaatttttgaaacgatgcttctatcattctggtcaatatgattctgaagccaattttgccgaacttgacaaaaaactgaaggaacacgaggctggaacaattgccaatcgtcttttctatctatcaattccaccaaacatttttataaatgctgtaaaatctgcaagcatatccgcttcttctgcaaatggctggacaagggtcatcgtagagaaaccatttggtcgggattctgaatcctctgctgcactgacaacagctctcaaacagtatctggaggaagatcaaatattcaggatagatcactatcttggaaaagagctagtggagaatctttctgtccttcgattctccaatctcatatttgaacctttatggtctagacagtttattagaaacgtgcagctgatattttctgaagattttggaaccgaaggcaggggagggtactttgataactatggaatagtcagagacataatgcaaaaccatctgctacaaattttggcactctttgccatggaaacacctgttagtttggatgcagaagatatcaggaatgaaaaagtcaaagttctccgatcaatgaggcccattcaacttgatgatgtggttatagggcagtataagagccacacaaggggaggtgtcaattaccctgcatacaccgacgacaagactgtcccccataatagtctgacaccaacatttgctgcagccgccctttttatagataatgcaagatgggatggtgtaccgtttttaatgaaagctggaaaagccctccatgataggaggactgagataagagtacagtttagacatgtacctggtaatctatacaaacggaactttggaacaaatcttgaccatgagaccaatgagcttgttattcgcgtacaacctgatgaagctatatatctgaagattaataataaggtgccaggtttaggaatgagactggatcgcagcaatctgaatctcttatattcgacaaggtactcgggggagatccccgatgcatacgaaaggcttcttcttgatgccgtcgaaggtgaaaggagactgtttatccgcagtgacgaactggatgctgcttggtcgctctttacacccgtattgaaagatctagaagacaagaaaactgttcccgaatattacccttatgggagtcgaggacccgttggtgctcactatcttgcagccaaatataaagttaggtggggagattttgcaggagatcaatgactagcaagtattttgcatcgcttccaaacagtagaatgtaggaagaacttggccctgaggttggttttctttgttttagtgcatctatcagcattgtaccgcgtgttcaaagaagtaaaatggtatgtccaaaggccttgagatctgtggatgaatgctttgagcaattgagcttataataatttacagagtagtcttagtatttgtaagatgctgtaatggttttctttatgtatctagggatagtaagatagcatctgcaagatctgttttcattttaactgcaacaaatctgagaagaataatggtacatgtttcattgaccttttatagtacaaagttattgttttcataaaaaaaaaaaaaaaaaaaa

SEQ ID NO: 82 - protein, 604 aa, Petroselinum crispum
  Petroselinum crispum (parsley)
MATLSSATNCRSSSSSSYSSSSSLFPRIHHQQHFIVSLASPKPLFNKLSFHSNQPSFSFTPAPAPAAASQDGAISTTVPHIENETPLKKVKNANLSVPPPQESKGITPFRLNKDKSSVTITVVGASGDLAKKKIFPALFALYYEDCLPEHFTIFGYARSKMTDAELRDMVSKTLTCRIDKRANCGEKMEQFLKRCFYHSGQYDSEANFAELDKKLKEHEAGTIANRLFYLSIPPNIFINAVKSASISASSANGWTRVIVEKPFGRDSESSAALTTALKQYLEEDQIFRIDHYLGKELVENLSVLRFSNLIFEPLWSRQFIRNVQLIFSEDFGTEGRGGYFDNYGIVRDIMQNHLLQILALFAMETPVSLDAEDIRNEKVKVLRSMRPIQLDDVVIGQYKSHTRGGVNYPAYTDDKTVPHNSLTPTFAAAALFIDNARWDGVPFLMKAGKALHDRRTEIRVQFRHVPGNLYKRNFGTNLDHETNELVIRVQPDEAIYLKINNKVPGLGMRLDRSNLNLLYSTRYSGEIPDAYERLLLDAVEGERRLFIRSDELDAAWSLFTPVLKDLEDKKTVPEYYPYGSRGPVGAHYLAAKYKVRWGDFAGDQ

SEQ ID NO: 83 - DNA, 1848 bp, Petroselinum crispum
  Petroselinum crispum (parsley)
  CDS (41)..(1528)
ttctcttgaagcattcttcattcttgctttcagcttgaagatgacatctgataaatggagtatagagaaaagagcacctcttagaaatgattctgttttgaaagaagaaaatgtgccagaaattggatgtctttcaattgttgttcttggtgcttctggtgatcttgccaagaaaaagacttttccagcacttttcaatctttatcgtcaggggtttttgcaatcacatgaagtctacattttcggctatgcaaggacaaagatatcggacgaagagttgagagatcgaattcgtggatatcttgttccaagcaagaatactgtggaggggcatgaagaagatttaactaactttctgcaattgatcaaatatgtttgcggatcttatgacaccgaggaggggtatcaattactggataaagaaatatctgagcacgaaatatacagaaattgcacggaaggatcatcccgtagactattttaccttgctcttcctccatcagtatatcctcctgtctgcaagatgatcaggaaatgctgcatgaataaatctgatcttggtggatggactcggattgttgttgaaaagccctttggcagggatttggagtcggctgagcaactcagtaaccagataggggagttgtttgaagagccccagatttaccgtattgatcattatctgggaaaagaattggtgcagaacttgttggtacttcgtttcgcaaatcgtttcttcatgccactttggaatcgtgacaacattgacaatattcagattgtatttagggaggattttggaactgatggccgtggtggatattttgatcagtacggaattatccgcgatatcatccaaaaccatctattgcaggtcctatgccttgttgccatggagaagcctgtctctcttaagcctgagcatattcgagatgagaaagtgaaggttcttcaatctgtagttcctataaaagatgaagaggttgtgctcggacagtacgatggctatttggaagacccgacagttcctgatggctcgtacactcccacatttgctactatggttttaagaatacacaatgagagatgggaaggtgtaccctttatactcaaggccgggaaagctttgaattctagaaaggcagaaatccgggttcagttcaaggatgttcctggtgatatattcaaaagtaagaagcaaggaaggaacgaatttgtaatacgcctgcaaccttcagaggcaatgtatatgaagcttacagtcaaacaaccaggacttaagatgtcaactgtgcaaagtgagatggacttgtcatacggacagcgttatcaggacgttaccattccagaagcttatgaacgtctgattcttgatacgataagaggtgaccaacaacattttgttcggagagatgaacttaaggcggcctgggagattttcactcctctcctgcacagaatcgacaagggagagtttaaatcacttccgtacaagccaggcagcagagggccagaggaaagcggataagctgcttgagaaggccggttatgttcagacacatggctacatttggatccctcccaccctatagaaatccttagcttataaatgcaaacatgatcagataatgtatcagtataatcacttgaggttgtgatatttgtaagttagtttactatcagcgtttgttctcattatgtaaccttgtaatctgtttattttggtttgtatacgttatatgttgaattataaaaagtaaggaatattctccttagtttatcaaaaaaaaaaaaaaaaaaaaaaaaaaaaaaaaaaaaaaaaaaaaaaaaaaaaaaaaaaaaaaaaaa

SEQ ID NO: 84 - protein, 495 aa, Petroselinum crispum
  Petroselinum crispum (parsley)
MTSDKWSIEKRAPLRNDSVLKEENVPEIGCLSIVVLGASGDLAKKKTFPALFNLYRQGFLQSHEVYIFGYARTKISDEELRDRIRGYLVPSKNTVEGHEEDLTNFLQLIKYVCGSYDTEEGYQLLDKEISEHEIYRNCTEGSSRRLFYLALPPSVYPPVCKMIRKCCMNKSDLGGWTRIVVEKPFGRDLESAEQLSNQIGELFEEPQIYRIDHYLGKELVQNLLVLRFANRFFMPLWNRDNIDNIQIVFREDFGTDGRGGYFDQYGIIRDIIQNHLLQVLCLVAMEKPVSLKPEHIRDEKVKVLQSVVPIKDEEVVLGQYDGYLEDPTVPDGSYTPTFATMVLRIHNERWEGVPFILKAGKALNSRKAEIRVQFKDVPGDIFKSKKQGRNEFVIRLQPSEAMYMKLTVKQPGLKMSTVQSEMDLSYGQRYQDVTIPEAYERLILDTIRGDQQHFVRRDELKAAWEIFTPLLHRIDKGEFKSLPYKPGSRGPEESG

SEQ ID NO: 85 - DNA, 1957 bp, Petroselinum crispum
  Petroselinum crispum (parsley)
  CDS (74)..(1678)
gttggttaaggagtcgctgcaacaaagtcaaatatattggaatcgaaaactcaatctgtgttgtatacgggttatgaaatcagcagtgtgtgacatagttcataagatgtcggataaatggtgcttagaggaaagagcccctgttgttgaggatagtgccggagatcctattgttaaagatactcaaccaccaccacccgtgtctgaagatggttgcctatcaattgttgtgcttggtgcttctggtgatcttgccaagaaaaagacttttcctgctctctttaacctttaccgccagggtttcttgcagtcacatgaagtatacatttttggctatgccaggaccaagatttctgatgatgacttgagagaccgcattcgtggatatcttactccaaacaagaacactgcagaaggacacacagaagatgtatcaaaatttctgcaactgatcaaatacgtctgtggttcttatgacgcagcggagggttttcagtgtttggataaggaaatatctgagcatgaaatatcaagaaacagtattgaaggatcgtcccggagactattttaccttgcacttcctccttcagtatatcctcctgtctgcaaaatgattaagacttactgcatgaataaatctgatcttggtggatggactcgtattgttgttgagaagccctttggtagggacttggagtcagctgagcatctcagtaaccagataggagaactgtttgaggagccacagatatatcggattgatcactatttgggaaaagagctggtgcagaatttgttggtgcttcgttttgctaatcgtttcttcctgccttcatggaatcgtgacaacatcagtagtgtgcagattgtcttccgagaggattttggaactgaaggccgtggcggatattttgatcagtatggaatcatccgggatattatccaaaatcatctcttgcaggttctttgcctcgttgctatggaaaaacctatttctcttaaacctgagcacattcgagatgagaaagtgaaggttcttcaatctgtagctccacttaatgatgaagaggttgtgcttggacaatatgatggttacttggatgatcccactgtgcccgctggctctaacactccaacttttgcaaccatggtattgcgtatacacaatgaaagatgggaaggtgttcctttcgtacttaaggctggaaaagcattggaatctagaaaggcagaaattcgtatccaattcaaggaagtcccgggtgatatatttaaatgtcaaaagcaggggagaaatgaatttgtgatacggttacaaccttcagaggccatgtatatgaaacttacagtcaagaagcctggacttgagatgtctactgctcagagtgagctcgacttgtcatatgggcagcgttatcaggatgtaaccataccggaggcttatgaacgacttattcttgacactataaggggtgatcagcagcattttgttcgcagagatgagttgaaggcagcctgggagattttcacccctcttcttcacagaatagataaaagtgaacttaaatcagtttcatacaaaccaggcagccgaggcccagaggaagcggatgagttgctgaaaaaagttggctatgttcagacacatggctatacatggattcctccaaccctataatctgaacaggctgcattgatgcttggttgacggcttatcggtaatataagatgggaagttcccaaggtcccctgtgaaataataaatacatcagtacaaatgtatctctgtgatacacgtgatgtttttacgaggatcaaccttttcaaagtaagcttgatctatttacttaaccttgttcgctaaagtgtgtctctgtaatgtgttttgacgaacatgcactatttataagttgttgaaaatgtgaagcttatatactgtaaaaaaaaaaaaaaaaaa

SEQ ID NO: 86 - protein, 534 aa, Petroselinum crispum
  Petroselinum crispum (parsley)
MKSAVCDIVHKMSDKWCLEERAPVVEDSAGDPIVKDTQPPPPVSEDGCLSIVVLGASGDLAKKKTFPALFNLYRQGFLQSHEVYIFGYARTKISDDDLRDRIRGYLTPNKNTAEGHTEDVSKFLQLIKYVCGSYDAAEGFQCLDKEISEHEISRNSIEGSSRRLFYLALPPSVYPPVCKMIKTYCMNKSDLGGWTRIVVEKPFGRDLESAEHLSNQIGELFEEPQIYRIDHYLGKELVQNLLVLRFANRFFLPSWNRDNISSVQIVFREDFGTEGRGGYFDQYGIIRDIIQNHLLQVLCLVAMEKPISLKPEHIRDEKVKVLQSVAPLNDEEVVLGQYDGYLDDPTVPAGSNTPTFATMVLRIHNERWEGVPFVLKAGKALESRKAEIRIQFKEVPGDIFKCQKQGRNEFVIRLQPSEAMYMKLTVKKPGLEMSTAQSELDLSYGQRYQDVTIPEAYERLILDTIRGDQQHFVRRDELKAAWEIFTPLLHRIDKSELKSVSYKPGSRGPEEADELLKKVGYVQTHGYTWIPPTL

SEQ ID NO: 87 - DNA, 1569 bp, Caenorhabditis elegans
  CDS (1)..(1569)
atggcatgcaaacgtcattcagtgtccgatcccatttcgaaggatctcgtcgagtgtcttcgtgaatcaatgcaaagagatctcaaatttgagactccgtacgttttcgtgatatttggagcatcgggagatctcgcaaaaaagaaaatatacccaacactgtggtggttgttccgtgacaaccttttgccagtcaacatcaaatttattggatatgcccgttccgatctgacagttttcaagcttcgtgaatcttttgagaaaaactgtaaagttcgagaaaatgagaaatgtgcttttgatgacttcatcaagaagtgctcatacgttcagggccaatacgacacttctgaaggattccaacgccttcaatcttcaattgatgatttccaaaaagaaagcaataatcaagccgtcaatcgtctctactacctcgctcttcctccatcagttttcaacgtggtttctacggaattaaagaagaattgtatggatcatggtgattcatggacacgtgttatcatagaaaaaccatttggacatgatttgaaatcatcttgtgaactttcaactcatttggcgaaactttttaaagaagatcaaatctaccgtattgatcattatctcggaaaagaaatggttcagaatttgatggttatgcgatttggaaaccgaattctcgctccatcttggaaccgcgatcacattgcatcagttatgatctcatttaaagaagattttggaactggtggccgtgctggatattttgatacagctggaattatccgtgatgttatgcagaatcatttgatgcaaattctaactttagtcgccatggagaaaccagcaagtttgaatgctgaagatattcgtgatgaaaaggtcaaagtgttgaaagctgctaaagttgtagaattaaaggatgtagtagttggacaatacattgccagtcctgaatttgatcacccagaagcatcacaaggatacaaagatgacaaatcagttccagccgattcgactactccaacgtatgctcttgctgttgttcacatcaataatgaacgttgggagggtgttccattcttcttgcgttgtggaaaagctctcaacgagaagaaagcagaagttcgtatacaattcaaagaagtcagtggagatatctatccgtctggtgaattaaagcgatccgaattagtgatgagagtgcaaccaaatgaggcagtttacatgaaactgatgaccaagaaacctggaatgggattcggtgttgaagaaactgaacttgatttgacttataataatagattcaaagaagtccgtcttcctgatgcttatgaacgcctatttctcgaagtattcatgggatctcaaattaatttcgttcgaactgatgagcttgaatacgcttggcgtattttgacgccagttctcgaagagcttaaaaagaagaaagttcaaccggttcaatataaatttggaagtcgtggtccaactgaaggtgacgaattgatgaaaaagtacggtttcatcttcactggaacatacaaatgggttgctccaaagctataa

SEQ ID NO: 88 - protein, 522 aa, Caenorhabditis elegans
MACKRHSVSDPISKDLVECLRESMQRDLKFETPYVFVIFGASGDLAKKKIYPTLWWLFRDNLLPVNIKFIGYARSDLTVFKLRESFEKNCKVRENEKCAFDDFIKKCSYVQGQYDTSEGFQRLQSSIDDFQKESNNQAVNRLYYLALPPSVFNVVSTELKKNCMDHGDSWTRVIIEKPFGHDLKSSCELSTHLAKLFKEDQIYRIDHYLGKEMVQNLMVMRFGNRILAPSWNRDHIASVMISFKEDFGTGGRAGYFDTAGIIRDVMQNHLMQILTLVAMEKPASLNAEDIRDEKVKVLKAAKVVELKDVVVGQYIASPEFDHPEASQGYKDDKSVPADSTTPTYALAVVHINNERWEGVPFFLRCGKALNEKKAEVRIQFKEVSGDIYPSGELKRSELVMRVQPNEAVYMKLMTKKPGMGFGVEETELDLTYNNRFKEVRLPDAYERLFLEVFMGSQINFVRTDELEYAWRILTPVLEELKKKKVQPVQYKFGSRGPTEGDELMKKYGFIFTGTYKWVAPKL

SEQ ID NO: 89 - DNA, 1779 bp, Streptomyces coelicolor
  CDS (1)..(1779)
atgagcgaggagcttcccgctggggcgccccaggagaccaaggcgacgaaggaagccaaggagacccggacggcccaggaggcggcggggccgctgcacgcggaggaggccgaggaggcccgcgccgccgaggcggcgaaggcgtccggccgggcgaaggctccccgcggcgcgaagaagtccgcgacgaaccgcgccgccaaggaggcgaagggcaagggcgcggccggggagggcgtcgagccggtggcaccgctcgactggagcaacccgctgcgcgatccccaggaccgccgtctcccccgcatcgcgggcccgtccgggctggtcatcttcggcgtcaccggcgacctgtcccgcaagaagctgatgcccgccgtgtacgacctggccaaccgcggcctgctgccgcccggcttctcgctggtcggcttcgcccgccgggactgggaggaccaggacttcgccgaggtcgtgcacgacgccgtcagggagcacgcgcgcacgccgttccgcgaggaggtctggcagcagctctccgagggcatgcgcttcatccccggcgacttcgacgacgacaacgcgttcgaacagctgcgcaaggccgtcgaggagctggacgcgtcccgcggcaccagcggcaactacgccttctacctctccgtgccgccgaagttcttcccgaaggtcgtccagcagctcaagaagcacgggctgaccgacgcgcccgcgggctcctggcgccgtgcggtgatcgagaagccgttcggccacgacctggacagcgcccgcgacctgaacgcgctggtgcacgaggtgttcgacccggagcaggtcttccgcatcgaccactacctgggcaaggagacggtccagaacatcctggcgctgcgcttcgccaaccagatgtacgagccgatctggaaccggtcctacgtggaccacgtgcagatcacgatggccgaggacatcggcatcggcggccgggccggctactacgacggcatcggcgccgcccgcgacgtcatccagaaccacctgctccagctgatggcgctgaccgccatggaggagccggccgccttcgacgcgcggtcgctgctcaccgagaagctgaaggtgctgcgggcggtgcggctgcccgacgacctgggcgagcacaccgtgcgcgggcagtacgcgggcggctggcagggcggcgcgcaggtgcccggctacctggaggaggagggcatcgacccggcctccaccaccgacacctacgcggcgatcaagctcggcatcgacaaccgccgctgggccggggtgcccttctacctgcgcaccggcaagcgcctgggccgccgggtcaccgagatcgcggtcgtcttccagcgggccccgcactcccccttcgactccacggcgacggaggagctgggcgagaacgccatcgtcatccgcgtccagcccgacgagggcatgacggtgcgcttcggctccaaggtgccgggcacgtcgatggagatccgggacgtgtcgatggacttcgcgtacggcgagtccttcaccgagtccagcccggaggcgtacgaacggctgatcctggacgtccttctgggtgacgccaacctgttcccgcgccaccaggaggtggaagagtcctggcggatcctcgacccgatcgaggagtactgggcctcgcacgacaagcccgcgcagtacgcgtcgggcggctggggaccgcgggaagcggacgagatgctcgcacgagacggacggagctggcgcaggccatga

SEQ ID NO: 90 - protein, 592 aa, Streptomyces coelicolor
MSEELPAGAPQETKATKEAKETRTAQEAAGPLHAEEAEEARAAEAAKASGRAKAPRGAKKSATNRAAKEAKGKGAAGEGVEPVAPLDWSNPLRDPQDRRLPRIAGPSGLVIFGVTGDLSRKKLMPAVYDLANRGLLPPGFSLVGFARRDWEDQDFAEVVHDAVREHARTPFREEVWQQLSEGMRFIPGDFDDDNAFEQLRKAVEELDASRGTSGNYAFYLSVPPKFFPKVVQQLKKHGLTDAPAGSWRRAVIEKPFGHDLDSARDLNALVHEVFDPEQVFRIDHYLGKETVQNILALRFANQMYEPIWNRSYVDHVQITMAEDIGIGGRAGYYDGIGAARDVIQNHLLQLMALTAMEEPAAFDARSLLTEKLKVLRAVRLPDDLGEHTVRGQYAGGWQGGAQVPGYLEEEGIDPASTTDTYAAIKLGIDNRRWAGVPFYLRTGKRLGRRVTEIAVVFQRAPHSPFDSTATEELGENAIVIRVQPDEGMTVRFGSKVPGTSMEIRDVSMDFAYGESFTESSPEAYERLILDVLLGDANLFPRHQEVEESWRILDPIEEYWASHDKPAQYASGGWGPREADEMLARDGRSWRRP

SEQ ID NO: 91 - DNA, 1524 bp, Streptomyces coelicolor
  CDS (1)..(1524)
atgtcaagcagcaatccgctgcgtgaccccgcagaccgacggctcccgcgcatcgcggggccgtcgggtctggtcatcttcggcgtcaccggcgatctgtcccgcaagaagctcatgcccgccgtgtacgacctcgccaaccggggtctgctgccgccgggcttctcgctcgtcgggttcgcccgccgggactgggagcacgaggacttcgcccaggtcgtgcacgacgccgtcaaggagcactcccgcacgccgttccgcgaggaggtctggcagcagctcatccaggggatgcgcttcgtgcagggcaccttcgacgacgacgacgccttcgagcggctgcgcggcaccatcgaggagctggacaaggcacagggcacgggcggcaacttcgccttctacctgtcggtgccgccgaagtccttcccggtggtcatccagcagctcaagaagcacggactggccgaccagacgaacggctcctggcggcgggcggtgatcgagaagcccttcggccacgacctgaagtcggccgaggagctgaacgccatcgtccacgaggtcttcggctccgaccaggtcttccgcatcgaccactacctgggcaaggagaccgtccagaacatcctggcgctgcgcttcgccaacacgatgttcgagccgatctggaaccggtcctacgtcgaccacatccagatcaccatggccgaggacatcggcatcggcggccgggccggctactacgacgggatcggcgcggcgcgtgacgtcatccagaaccacctgctccagctgctcgcgctgaccgcgatggaggagcccgcctccttcgacgcggacgcgctggcggcggagaagaccaaggtgctcggcgcggtccgcctccccaaggacctgggccgggacaccgtgcgcggccagtacgcggcggggtggcagggcggcgccaaggccgtcggttacctcgaagaggacggcatcgaccccaagtcgaagaccgacacctacgccgcgatcaaggtgggcatcgacaaccgccgctgggcgggtgtccccttctacctgcgcaccggcaagcggctgggccgccgggtcacggagatcgcggtcgtcttccagcgggccccgcactcccccttcgacacgacggccaccgaggaactcggctcgaacgcgatcgtcatccgcgtccagcccgacgagggcgtcaccgtccgcttcggttccaaggtgccgggcacgtcgatggagatccgggacgtgtcgatggacttcgcctacggcgagtccttcaccgagtccagcccggaggcgtacgagcgcctgatcctggacgtcctgctcggcgacgccaacctcttcccgcgcaccgaggaggtcgagctgtcctggaagatcctcgacccgatcgaggagtactgggacgagcacggcaccccggcccagtacccggccggcacctgggggcccgtcgaggcggacgacatgctggaacgagacggacggagctggcgccggccatga

SEQ ID NO: 92 - protein, 507 aa, Streptomyces coelicolor
MSSSNPLRDPADRRLPRIAGPSGLVIFGVTGDLSRKKLMPAVYDLANRGLLPPGFSLVGFARRDWEHEDFAQVVHDAVKEHSRTPFREEVWQQLIQGMRFVQGTFDDDDAFERLRGTIEELDKAQGTGGNFAFYLSVPPKSFPVVIQQLKKHGLADQTNGSWRRAVIEKPFGHDLKSAEELNAIVHEVFGSDQVFRIDHYLGKETVQNILALRFANTMFEPIWNRSYVDHIQITMAEDIGIGGRAGYYDGIGAARDVIQNHLLQLLALTAMEEPASFDADALAAEKTKVLGAVRLPKDLGRDTVRGQYAAGWQGGAKAVGYLEEDGIDPKSKTDTYAAIKVGIDNRRWAGVPFYLRTGKRLGRRVTEIAVVFQRAPHSPFDTTATEELGSNAIVIRVQPDEGVTVRFGSKVPGTSMEIRDVSMDFAYGESFTESSPEAYERLILDVLLGDANLFPRTEEVELSWKILDPIEEYWDEHGTPAQYPAGTWGPVEADDMLERDGRSWRRP

SEQ ID NO: 93 - DNA, 1422 bp, Schizosaccharomyces pombe
  CDS (1)..(1422)
atggttacttttatggtatttggtgcatcaggcaacctcgccaacaaaaagacattccctgccctgttccatctcttcaaacgaaacctggtagatcgttcttccttttacgtacttggatatgctagaagtaagatacctatcggtgaattcagggaaagtattcgtgaatctgtgaagccagatactgaaagcaaacaggtgtttcaggacttcattgaccgagtatcttacttcagtggtcagtatgatcagagcagttcttatgtggaatttcgaaaacacctagaatcagttgaaaaaaaagcagactcttcgaaagcacttcgtatcttttatatcgccttaccaccatctgtttacgtgacagtcagttctcatatatatgagaatttatatttaccaggaaaatcgcggttagttattgaaaaaccgtttggtaaaaactatcaatcggctgttaaactcaaagaagaagttcataagcattggaaagaggaagaaatttatcggattgatcattatacagccaaagatatggttaacaattttttcacccttcgttttgcaaactcttcgtccattgacgcagttttaaatcgccattctattcaatccgtcgaaatacacatgtatgaaacgggaggctgtgaaggccgtattggttactatgatgcgaatggagtcgttcgcgacgtcgtacagaatcatttaactcaaattttttgtattgctgctatgaatgaaccgaagtctgcttctgcgagtgatgttcgtgctgaaaaggtcaatttgttgaaagctaccagaccagcatctttgaaagaaagtatgcttggtcagtatacaactagcgaagacggtaaaataccgggctacttagacttggagggagtccctaaagatagtaaagccaccacatttgctgcatccactcttcatgttgataatgatcgatggaagggcgtacccttcgtatttgtctctggtaagcggatgaaaaaaggtgaagtatatatcaagtactatttccgtctaaaagactccggaattttctccgacgtaaaacgacgtcggtacttgattcttcatgttcagccggaggagtttgtcaatttgacatgtactattaataaacccatgactactgaccttcaaccgattgacgcctatgcttcgctcaattataatgagcaatttaaagatctgatgaaggaaaaacgagatggctatgaaattttattcgaagatgcaattcgcggtgatcccactaagttcattcgttatgatgaggttgagtatgcttggaagatatgggacgaaatcctcgattctcccaaaaaacctattccctatccagctggttcagatggtcctgagggtttggaagcttatatgaaaaggcatctaggccatgaatag

SEQ ID NO: 94 - protein, 473 aa, Schizosaccharomyces pombe
MVTFMVFGASGNLANKKTFPALFHLFKRNLVDRSSFYVLGYARSKIPIGEFRESIRESVKPDTESKQVFQDFIDRVSYFSGQYDQSSSYVEFRKHLESVEKKADSSKALRIFYIALPPSVYVTVSSHIYENLYLPGKSRLVIEKPFGKNYQSAVKLKEEVHKHWKEEEIYRIDHYTAKDMVNNFFTLRFANSSSIDAVLNRHSIQSVEIHMYETGGCEGRIGYYDANGVVRDVVQNHLTQIFCIAAMNEPKSASASDVRAEKVNLLKATRPASLKESMLGQYTTSEDGKIPGYLDLEGVPKDSKATTFAASTLHVDNDRWKGVPFVFVSGKRMKKGEVYIKYYFRLKDSGIFSDVKRRRYLILHVQPEEFVNLTCTINKPMTTDLQPIDAYASLNYNEQFKDLMKEKRDGYEILFEDAIRGDPTKFIRYDEVEYAWKIWDEILDSPKKPIPYPAGSDGPEGLEAYMKRHLGHE

SEQ ID NO: 95 - DNA, 1503 bp, Schizosaccharomyces pombe
  CDS (1)..(1503)
atgagttctgcaaatttatctatcaaggaaaatggcgcaatggtcgttttcggcgcttccggtgatctatccaagaaaaagacgtttccagctcttttctctttgtttagcgaaggacgtctccccaaagatattagaatcgttggctatgcgcgctccaagattgaacatgaagactttttagatcgcattacccaaaacatcaaaattgatgaagaggattcccaggccaaagagaagcttgaggaatttaaaaagagatgctcttactatcgtggctcttacgacaagcctgaagatttcgagggcttgaactctcatttgtgtgagagggaaggcgaccgttctacccacaaccgcattttctatctcgcgttacctcccgacgttttcgtatctgtagctacaaaccttaaaaaaaaatgtgtgcccgaaaaaggtattgctcgtcttgtaatcgagaagccatttggcgtcgatttgaaatccgcccaggaactccaatcccaattagctcccctttttgatgagaaggaaatttatcgtattgatcactatttaggcaaggagatggttcaaaatttggttcatcttcgtttttgcaatcctgttatttctcatctttgggacaaaaacagtatttccagtgttcaaattacattcaaagagcctattggtacggaaggccgtggtgggtactttgactctagtactattgtccgtgatatcgtgcaaaaccaccttgtccaaattctgacccttttgaccatggaaaccccgaccactttctctgcagacgatcttcgtgacgagaaagtcaaggtattgcgtcgcactcgattgggagatctcaaagatattgttcttggtcaatatgtcaaaagcaaggacggtaaaaaacctggctaccttgatgacgagactgttcccaagggtagtaggtgtcccacttactcagctattccctgttttattgataccgaaagatggcgcggcgttcctttcttacttaaagctggtaaagccatggatattggcaaggtagagattcgtgttcagttcaaagctgctgcaaatggtttatttaaggacgcatatcataatgagctcgtaatccgtgttcagccagacgaagctatttacttcaagatgaacattaagcaacccggtcttagtgaggctcccctccttactgatttggacttgacttactctcgtagatttaagaacatgaagctccatgaagcatatgaagcattgtttttggacgcgtttgccggtgaccaatcccgttttgctcgtatcgacgaattagaatgtgcctggtctttagttgatcctcttttgaaatatatggaggaagagaaacctgtacccgagccttacgagtatggttccgatggtcccgaatgtttatactcttttttgaaaaagttcggatatatttatgattcccctgattactatgattatccagtcatgtccgttccttccgatcactaa

SEQ ID NO: 96 - protein, 500 aa, Schizosaccharomyces pombe
MSSANLSIKENGAMVVFGASGDLSKKKTFPALFSLFSEGRLPKDIRIVGYARSKIEHEDFLDRITQNIKIDEEDSQAKEKLEEFKKRCSYYRGSYDKPEDFEGLNSHLCEREGDRSTHNRIFYLALPPDVFVSVATNLKKKCVPEKGIARLVIEKPFGVDLKSAQELQSQLAPLFDEKEIYRIDHYLGKEMVQNLVHLRFCNPVISHLWDKNSISSVQITFKEPIGTEGRGGYFDSSTIVRDIVQNHLVQILTLLTMETPTTFSADDLRDEKVKVLRRTRLGDLKDIVLGQYVKSKDGKKPGYLDDETVPKGSRCPTYSAIPCFIDTERWRGVPFLLKAGKAMDIGKVEIRVQFKAAANGLFKDAYHNELVIRVQPDEAIYFKMNIKQPGLSEAPLLTDLDLTYSRRFKNMKLHEAYEALFLDAFAGDQSRFARIDELECAWSLVDPLLKYMEEEKPVPEPYEYGSDGPECLYSFLKKFGYIYDSPDYYDYPVMSVPSDH

SEQ ID NO: 97 - DNA, 1428 bp, Schizosaccharomyces pombe
  CDS (1)..(1428)
atgctatccatcattgttttcggtgcatccggcgatctcgctaccaaaatgactttcccggccttgtttgccctttacgtccgcaaaattattcccgaggactttcaaatcatcggctatgcccgttccaaattgtcccaagaggccgctaacaaaatcgtcaccgcccatattcccattgacgatactgtcggtgcttctcaaaaggccttaaacacctttgtcgagcattacaagtatgtccccggtacttatgataagcccgagtcttttgagatgctaaacagcattattgctgaaaaggagactgctcccgcctccgaatgcacacgtatcttttacttggttctgcctcctcatctctttgctcccgtttccgagctaatcaagagtaaggctcatcccaatggtatggtcactcgtcttattgttgagaagcccatcggcttcgactacaagtctgccgatgccattctcagcgatctcagcaagcactggtctgccaaggatactttcaaagtcgaccatttccttggcgaggatatgattgatggattcactgcaattcgctttgcaaactccatgttcgagcccatctggaatcgtgaacacattgaaagtgttcgtgtcgactttcgtgaagactttggttgtgagggacgtggaggttattttgagggcgctggtatccttcgcgatgtcgttcaaaatcatcttttgcaactacttaccttactttgcatcgaagagccaaagtctcaagatgccgaagatatcatcaaatgcaaggttgacttcttgaaatcccttcatcccgtttccaaggaggacatcgtctatggacagtacactaaaagtgcaaatggaaaggtccccggttatcgtgaactggatggtgttgctgatgacagtgaagtttctacattctgtgctcttcaacttcgctctgaagcacctcgttggaagggtattcccatcatcatttctgccggtaaaggtttggaccgcgattactttgaagctcgtatcacttttaagcgtagggaaggaggtatgttccctaccgttgatagcagcaatgttctagtccttcgtgtttatcccaaggaattcattgccctcaagggacacattaaacaacctggtttctctcgtcaaattgttcctgtgactttggacgttaagtatcccgaagctttccctgatacatggatccataaggcctatgaagtggttattgccgatgccattaatggaaagcatacacactttattagtgatgatgaggttcgtacctcttggaaaatctttgatgatgtccttgacactacaggcgatttgtcacctcttccttatgcttttggttcccaccatggtccagatgccacactcgaatttttcaagaagcgtaatttagagtgggattaa

SEQ ID NO: 98 - protein, 475 aa, Schizosaccharomyces pombe
MLSIIVFGASGDLATKMTFPALFALYVRKIIPEDFQIIGYARSKLSQEAANKIVTAHIPIDDTVGASQKALNTFVEHYKYVPGTYDKPESFEMLNSIIAEKETAPASECTRIFYLVLPPHLFAPVSELIKSKAHPNGMVTRLIVEKPIGFDYKSADAILSDLSKHWSAKDTFKVDHFLGEDMIDGFTAIRFANSMFEPIWNREHIESVRVDFREDFGCEGRGGYFEGAGILRDVVQNHLLQLLTLLCIEEPKSQDAEDIIKCKVDFLKSLHPVSKEDIVYGQYTKSANGKVPGYRELDGVADDSEVSTFCALQLRSEAPRWKGIPIIISAGKGLDRDYFEARITFKRREGGMFPTVDSSNVLVLRVYPKEFIALKGHIKQPGFSRQIVPVTLDVKYPEAFPDTWIHKAYEVVIADAINGKHTHFISDDEVRTSWKIFDDVLDTTGDLSPLPYAFGSHHGPDATLEFFKKRNLEWD

SEQ ID NO: 99 - DNA, 1862 bp, Arabidopsis thaliana
  Arabidopsis thaliana (mouse-ear cress)
  CDS (43)..(1593)
ctacgtcagggtttggttagagtgttaaaaaactattggaagatgggttctggtcaatggcatatggagaagaggtctactttaaagaatgattcgtttgtaaaagaatacaatccaatcacggaaactgggagtctctctatcattgttcttggtgcttctggtgatcttgctaagaagaagacttttcctgcacttttcaatctatttcatcagggatttcttaatccagatgaagttcatatatttggatatgcaaggagtaagattactgatgaggagcttagagataaaatccgcggatatcttgttgatgagaagaatgcatctaagaaaacagaagctttgtccaagtttctaaagctgattaagtatgtgagtggaccttatgattctgaggaagggtttaagagattagacaaggcgattttggagcacgagatatctaaaaagactgctgaaggatcttcgaggagattgttttatcttgcacttcctccgtctgtataccctcctgtaagcaagatgatcaaggcatggtgcactaacaaatctgatcttggtggatggactaggattgttgttgagaaaccatttggaaaggatttggaatctgcagagcagctgagttctcagattggagccttgtttgaagaaccacagatttatcgtattgatcactatctgggaaaagagttagttcaaaacatgttggttcttcggtttgccaatcgcttgtttttgccactatggaaccgcgacaatattgcaaacgtacagatcgttttcagagaagattttggaactgaaggtcgcggtggatattttgatgaatacggaatcattcgtgatattattcaaaaccacttgctccaggttctttgccttgtcgccatggagaaaccaatctctcttaaacccgagcacatccgggatgagaaagtgaaggttcttcaatctgtgattcccataaaagatgaagaggtggttcttggacaatatgaaggatatagagatgatccaactgttccaaatgactcaaacactccaacgtttgccacaacaattcttcgcattaacaatgaaagatgggaaggtgttccttttatactgaaggccggaaaggcaatgagttcaaagaaggcagatattcgcattcagtttaaagatgttcctggcgacatattcaaatgtcaaaaccaagggaggaacgagtttgttatacgcttgcagccttcagaggccatgtacatgaagctaactgtgaagcaaccgggtctggagatgcaaaccgtgcagagtgaactagacctatcgtacaagcagcgttaccaagatgtctcaattccagaggcttacgaacgccttattcttgacacaatcagaggcgaccaacaacactttgttcgcagagacgaattaaaggcagcttgggaaatcttcactccactgcttcacaggatcgacaagggagaagtgaaatcggtcccatacaaacaaggtagccgtggcccagcggaagcagatcagctacttaagaaagctggttatatgcagactcatggctacatttggatccctcctacattgtaaatggtataatcatagagatgatgatgatgagtacacacaaaataagagggttttttttcttttttttccttgcttgctgaataaaaactcttcaccagtttggagtttgtttaagtgaatcttatgtatactagtgatcttcactaggacattgtttgtttatgccttgtagtttttgttgtactagtcccttgttttctttttttacataatgcaaaacagctttgtggaaaagctaattaaattaagaaaaaaaaaccctgacgtag

SEQ ID NO: 100 - protein, 516 aa, Arabidopsis thaliana
  Arabidopsis thaliana (mouse-ear cress)
MGSGQWHMEKRSTLKNDSFVKEYNPITETGSLSIIVLGASGDLAKKKTFPALFNLFHQGFLNPDEVHIFGYARSKITDEELRDKIRGYLVDEKNASKKTEALSKFLKLIKYVSGPYDSEEGFKRLDKAILEHEISKKTAEGSSRRLFYLALPPSVYPPVSKMIKAWCTNKSDLGGWTRIVVEKPFGKDLESAEQLSSQIGALFEEPQIYRIDHYLGKELVQNMLVLRFANRLFLPLWNRDNIANVQIVFREDFGTEGRGGYFDEYGIIRDIIQNHLLQVLCLVAMEKPISLKPEHIRDEKVKVLQSVIPIKDEEVVLGQYEGYRDDPTVPNDSNTPTFATTILRINNERWEGVPFILKAGKAMSSKKADIRIQFKDVPGDIFKCQNQGRNEFVIRLQPSEAMYMKLTVKQPGLEMQTVQSELDLSYKQRYQDVSIPEAYERLILDTIRGDQQHFVRRDELKAAWEIFTPLLHRIDKGEVKSVPYKQGSRGPAEADQLLKKAGYMQTHGYIWIPPTL

SEQ ID NO: 101 - DNA, 1696 bp, Leuconostoc mesenteroides
  CDS (123)..(1583)
tctagtcatttaatcaatttttgacttgttcaacgcttaatatgtttgtgaatcccgtacttttccagacctttttgcgttataatggagagtgaatttaattataatataaggggaacatcatggtttcagaaatcaaaacgttggtaactttctttggcggaactggtgatttagcaaagcgtaagctttacccatcagttttcaacctctacaaaaaaggatacttacaagaacactttgccattgttgggacagcacgtcaacaattaagtgatgacgagtttaagcaattggttcgtgattcaattaaagactttactgaagatcaagcacaagccgaagcgtttattgcgcatttttcttaccgtgcgcacgatgtcacagatgccgcttcttatggtatcttgaagtcagcgatcgaagaagcagcaaccaaatttgacattgatggcaatcgtattttctatatgtcagttgcccctcgtttcttcggtacaatcgctaaatatttgaaatcagaaggtttgctagctgagactggctacaatcgtttgatgattgaaaagccttttggtacatcatacgccaccgcagaagaattgcaaagtgatttggaaaatgcatttgatgatgaccaactgttccgtattgaccactatcttggaaaagaaatggtacaaaatattgcagcattacgttttggtaacccaatctttgatgccgcttggaataaggactatatcaaaaacgtacaagtaactttggctgaagttctaggtgttgaagagcgtgctggttactacgataccactggcgcccttttggatatgattcaaaaccacacaatgcaaattgttggttggttagcaatggaaaaacctgaatcattcaatgataaggatatccgtgcagctaaaaacgccgccttcaatgcattaaagatttataacgaagaagaagtgaataagtacttcgttcgtgcacaatatggtgctggtgatacagctgattacaagccatatttggaagaagcagatgtccctgctgactcaaagaacaacacattcattgctggtgaattgcagttcgatttgccacgttgggaaggtgttcctttctatgttcgttcaggtaagcgtttggctgccaagcaaacacgtgttgatattgtatttaaggctggcacattcaactttggttcagaacaagaagcacaagaatcagtactctcaatcatcattgatccaaagggtgctattgaattgaagcttaacgctaagtcagttgaagatgccttcaacacccgcacaatcaacttggattgggcagtatctgatgaagacaagaagaacacaccagaaccatacgaacgtatgattcacgatacaatgaatggtgacggatcaaactttgctgattggaacggtgtatcaattgcttggaagtttgttgacgcaattactgccgtttacgatgcagataaagcaccattggagacatataagtcaggttcaatgggtcctgaagcatcagacaagctattagctgaaaatggcgatgcttgggtatttaaaggataagcacatttaaaaagaccatcaaacaaatctttgtttgacggtctttttatattgtctgatttaagatgcgtttggtttcacggaaaacggctgacaaattggtgtattgatcc

SEQ ID NO: 102 - protein, 486 aa, Leuconostoc mesenteroides
MVSEIKTLVTFFGGTGDLAKRKLYPSVFNLYKKGYLQEHFAIVGTARQQLSDDEFKQLVRDSIKDFTEDQAQAEAFIAHFSYRAHDVTDAASYGILKSAIEEAATKFDIDGNRIFYMSVAPRFFGTIAKYLKSEGLLAETGYNRLMIEKPFGTSYATAEELQSDLENAFDDDQLFRIDHYLGKEMVQNIAALRFGNPIFDAAWNKDYIKNVQVTLAEVLGVEERAGYYDTTGALLDMIQNHTMQIVGWLAMEKPESFNDKDIRAAKNAAFNALKIYNEEEVNKYFVRAQYGAGDTADYKPYLEEADVPADSKNNTFIAGELQFDLPRWEGVPFYVRSGKRLAAKQTRVDIVFKAGTFNFGSEQEAQESVLSIIIDPKGAIELKLNAKSVEDAFNTRTINLDWAVSDEDKKNTPEPYERMIHDTMNGDGSNFADWNGVSIAWKFVDAITAVYDADKAPLETYKSGSMGPEASDKLLAENGDAWVFKG

SEQ ID NO: 103 - DNA, 1545 bp, Corynebacterium glutamicum
  CDS (1)..(1545)
atgagcacaaacacgaccccctccagctggacaaacccactgcgcgacccgcaggataaacgactcccccgcatcgctggcccttccggcatggtgatcttcggtgtcactggcgacttggctcgaaagaagctgctccccgccatttatgatctagcaaaccgcggattgctgcccccaggattctcgttggtaggttacggccgccgcgaatggtccaaagaagactttgaaaaatacgtacgcgatgccgcaagtgctggtgctcgtacggaattccgtgaaaatgtttgggagcgcctcgccgagggtatggaatttgttcgcggcaactttgatgatgatgcagctttcgacaacctcgctgcaacactcaagcgcatcgacaaaacccgcggcaccgccggcaactgggcttactacctgtccattccaccagattccttcacagcggtctgccaccagctggagcgttccggcatggctgaatccaccgaagaagcatggcgccgcgtgatcatcgagaagcctttcggccacaacctcgaatccgcacacgagctcaaccagctggtcaacgcagtcttcccagaatcttctgtgttccgcatcgaccactatttgggcaaggaaacagttcaaaacatcctggctctgcgttttgctaaccagctgtttgagccactgtggaactccaactacgttgaccacgtccagatcaccatggctgaagatattggcttgggtggacgtgctggttactacgacggcatcggcgcagcccgcgacgtcatccagaaccacctgatccagctcttggctctggttgccatggaagaaccaatttctttcgtgccagcgcagctgcaggcagaaaagatcaaggtgctctctgcgacaaagccgtgctacccattggataaaacctccgctcgtggtcagtacgctgccggttggcagggctctgagttagtcaagggacttcgcgaagaagatggcttcaaccctgagtccaccactgagacttttgcggcttgtaccttagagatcacgtctcgtcgctgggctggtgtgccgttctacctgcgcaccggtaagcgtcttggtcgccgtgttactgagattgccgtggtgtttaaagacgcaccacaccagcctttcgacggcgacatgactgtatcccttggccaaaacgccatcgtgattcgcgtgcagcctgatgaaggtgtgctcatccgcttcggttccaaggttccaggttctgccatggaagtccgtgacgtcaacatggacttctcctactcagaatccttcactgaagaatcacctgaagcatacgagcgcctcattttggatgcgctgttagatgaatccagcctcttccctaccaacgaggaagtggaactgagctggaagattctggatccaattcttgaagcatgggatgccgatggagaaccagaggattacccagcgggtacgtggggtccaaagagcgctgatgaaatgctttcccgcaacggtcacacctggcgcaggccataa

SEQ ID NO: 104 - protein, 514 aa, Corynebacterium glutamicum
MSTNTTPSSWTNPLRDPQDKRLPRIAGPSGMVIFGVTGDLARKKLLPAIYDLANRGLLPPGFSLVGYGRREWSKEDFEKYVRDAASAGARTEFRENVWERLAEGMEFVRGNFDDDAAFDNLAATLKRIDKTRGTAGNWAYYLSIPPDSFTAVCHQLERSGMAESTEEAWRRVIIEKPFGHNLESAHELNQLVNAVFPESSVFRIDHYLGKETVQNILALRFANQLFEPLWNSNYVDHVQITMAEDIGLGGRAGYYDGIGAARDVIQNHLIQLLALVAMEEPISFVPAQLQAEKIKVLSATKPCYPLDKTSARGQYAAGWQGSELVKGLREEDGFNPESTTETFAACTLEITSRRWAGVPFYLRTGKRLGRRVTEIAVVFKDAPHQPFDGDMTVSLGQNAIVIRVQPDEGVLIRFGSKVPGSAMEVRDVNMDFSYSESFTEESPEAYERLILDALLDESSLFPTNEEVELSWKILDPILEAWDADGEPEDYPAGTWGPKSADEMLSRNGHTWRRP

SEQ ID NO: 105 - DNA, 2491 bp, Cricetulus griseus
  CDS (136)..(1683)
tgaggcgggtcagctcagtcaaagcacccgccctcctgcgttaaacgagccagctaagcgcacgccccggaaacgagctgtgcactccagaactgtaaacctgtttggcagcagcaactaaacacagaaaacaccatggcagagcaggtggccctgagccggacccaggtgtgtggcatcctgagggaagagttgtaccagggtgatgccttccaccaagctgatacacatatatttatcatcatgggtgcatcgggtgacctggccaagaagaagatctatcccactatctggtggctgttccgggatggccttctacccgaagacaccttcattgtgggctatgcccgctcccgactcacagtggatgacatccgcaagcagagtgagcccttctttaaagccaccccagaggaaagacccaagctggaggagttctttgcccgtaactcctatgtggctggccagtatgatgatccagcctcctacaagcacctcaacagccacatgaatgccctgcatcaggggatgcaggccaaccgcctattctacctggccttgccccccacagtctatgaagctgtcaccaagaacattcaagagacctgcatgagtcagacaggctggaaccgcatcatagtggagaagcccttcgggagagacctgcagagctccaaccagctgtcgaaccacatctcctctctgttccgtgaggaccagatctaccgcattgaccactacctgggcaaggagatggtccagaacctcatggtgctgagatttgccaacaggatctttggccccatctggaaccgagacaacattgcctgtgtgatcctcacatttaaagagccctttggtactgagggtcgtgggggctactttgatgaatttgggatcatcagggatgttatgcagaaccacctcctgcagatgttgtgtctggtggccatggaaaaacctgcctccacagattcagatgatgtccgtgatgagaaggtcaaagtgttgaaatgtatctcagaggtggaaaccagcaatgtggtccttggccagtatgtggggaaccccaatggagaaggagaagctaccaatgggtacttggatgaccccacagtgccccgtgggtccaccactgccacctttgcagcagctgtcctctatgtggagaatgagcggtgggatggggtacccttcatcctgcgctgtggcaaagccctgaatgaacgcaaggctgaggtgagactacagttccgagatgtggcaggcgacatcttccaccagcagtgcaagcgtaatgagctggtgattcgtgtgcagcccaatgaggctgtatacaccaagatgatgaccaagaagcctggcatgttcttcaaccctgaggagtcagagctggacttgacctatggcaacagatacaagaatgtgaagctccctgatgcctatgaacgcctcatcctggatgtcttctgtgggagccagatgcactttgtccgcagtgatgaactcagggaagcctggcgtatcttcacaccactgctgcacaagattgatcaagagaagccccagcctatcccctatgtttatggcagccgcggccccacagaggcagatgagctgatgaagagagtgggcttccagtatgagggcacctacaaatgggtgaaccctcacaagctctgagccttgggaacttataccatctgcactctgccccttttggacaccctttctgtgtctatccttcttaccacctaacctcatatttggactattagccccacattggaacgactttgggaccataggctttagccacacattccagtccctgggctcgtgccaccactctataccctatgctgctgctgctgctgctaccactgccaccaccaccatcactgctgctgctgctgttaccaccaccactgaccccagctacattcctcaactatcaaattctccaagttctcaaaactcactgtaatgctttcagggccaccattgaccctatctgagccacccatctctccacaagaagcaaatcacctcctcccctcactccagcccctgcaaagggaagaagaacagcctatcagtctgtccctagactcctcaagacaggagttaggaacaatggggaggaaccttgagcctcagagggataaagaccaaaccacactccctagtgtctatgggcaagctcctcaaaattcaaatgaaatggtcaaggacacccatgtgagaagacctgcccatggccacaccagcttcagtgccacttgacattcctcctcaccagctggaagagaccacatactgcctaacaatattgtggcactagagatgtcccctaaccaactccatactccatggtcatcatcccacccacaggcagccttctcaccaaaggaaggcagaagtagcagctatgatttccctaccccaaccttgcaattaaatcctccaacagttaaaaaaaaaaaaaaaa

SEQ ID NO: 106 - protein, 515 aa, Cricetulus griseus
MAEQVALSRTQVCGILREELYQGDAFHQADTHIFIIMGASGDLAKKKIYPTIWWLFRDGLLPEDTFIVGYARSRLTVDDIRKQSEPFFKATPEERPKLEEFFARNSYVAGQYDDPASYKHLNSHMNALHQGMQANRLFYLALPPTVYEAVTKNIQETCMSQTGWNRIIVEKPFGRDLQSSNQLSNHISSLFREDQIYRIDHYLGKEMVQNLMVLRFANRIFGPIWNRDNIACVILTFKEPFGTEGRGGYFDEFGIIRDVMQNHLLQMLCLVAMEKPASTDSDDVRDEKVKVLKCISEVETSNVVLGQYVGNPNGEGEATNGYLDDPTVPRGSTTATFAAAVLYVENERWDGVPFILRCGKALNERKAEVRLQFRDVAGDIFHQQCKRNELVIRVQPNEAVYTKMMTKKPGMFFNPEESELDLTYGNRYKNVKLPDAYERLILDVFCGSQMHFVRSDELREAWRIFTPLLHKIDQEKPQPIPYVYGSRGPTEADELMKRVGFQYEGTYKWVNPHKL

SEQ ID NO: 107 - DNA, 1852 bp, Nicotiana tabacum
  CDS (102)..(1634)
acgttttgtctctcataatttcttcagatcagaaatcacaaggttgaagtgatcacaactacttggctgtattgagttcaagctggtcgtgggccttgaagatggcagcatcatggtgcattgaaaaaagaggttctcttcggctcgactcttttagagagaatgataatatacctgaaaccgggtgtctttccattattgttcttggcgcttctggtgatcttgccaagaagaaaacttttcctgctctcttcaacctctaccgacagggattcctgcaatccaatgaagttcacatttttggctatgcaaggacaaaaatttctgacgatgacttgagaagccgtatccgtgggtatctttctaaggggaaagaatatgaagaagtatcggagtttctgcaactgattaaatacgtcagtggctcttatgattctggggagggctttagtttactggacaaggcgatagctgagcacgaattcgcaaaaaatagcacggaaggatcatccagaagactcttctactttgctcttcctccatcagtatatccctctgtttgcaggatgataaaaaactattgtatgaacaaatctgatcttggtggttggactcgcattgttgttgagaagcccttcggcaaggatttagcttcagctgagcaactaagttcccagataggagaactatttaatgaaccccaaatttaccggattgaccattatttggggaaggagttggttcagaatgtgttggttctgcgttttgcaaaccgcttctttttgccgctctggaatcgtgacaacattgataatatacagattgtctttagggaggactttggaactgaaggccgcggtggatattttgatgaatatgggattatacgtgacattattcagaatcagctactgcaggtcctttgccttgttgctatggagaagcccgtgtctcagaagcccgagcacgtccgggatgagaaagttaaggttcttcaatcaatgcttccaatcaaagatgaagaggtcgttcttgaacaatatgaaggctataaggatgacccaacggttcctggcaactcaaatactcctacttttgcaactatggttttacgcatacacaatgaaagatgggaaggtgtgccctttataatgaaggctggaaaagcactaaattcaagaaaagcagaaatacgagtgcagtttaaggatgttcctggtgatatatttagatgtaaaaagcaggggagaaatgagtttgttatacgcctccagccttcagaagccatgtacatgaagcttacggtcaagaagcctgggcttgaaatgtcaactgttcaaagtgaattagacctgtcatatgggcagcgttatcaaggggttgtcattccagaggcttatgaacgtctgattctcgacacaataagaggggatcagcagcattttgtgcgcagagatgagctcaaggccgcttgggagatttttaccccacttttgcatagaattgacgatggagagatcaagccaattccatacaagccgggcagcagaggtcctgctgaagcagatgagttgctgcaaaatgtcggttacgttcaaactcatggctatatatggattcctcccacattataagtttgcaatgcgtgtcgcgaattacatcctactgtcccctaaatatgagtattaccttgtaacttttgccatgtatgatcctacctatgtgcaaactcgatgagaagtaagattttagtcggtataggagaaatatatctgcatgtaataatgtcatcttttttaagctaatgcatggaagtttgaatatatctcaagtttttcgcggccgcgaattc

SEQ ID NO: 108 - protein, 510 aa, Nicotiana tabacum
MAASWCIEKRGSLRLDSFRENDNIPETGCLSIIVLGASGDLAKKKTFPALFNLYRQGFLQSNEVHIFGYARTKISDDDLRSRIRGYLSKGKEYEEVSEFLQLIKYVSGSYDSGEGFSLLDKAIAEHEFAKNSTEGSSRRLFYFALPPSVYPSVCRMIKNYCMNKSDLGGWTRIVVEKPFGKDLASAEQLSSQIGELFNEPQIYRIDHYLGKELVQNVLVLRFANRFFLPLWNRDNIDNIQIVFREDFGTEGRGGYFDEYGIIRDIIQNQLLQVLCLVAMEKPVSQKPEHVRDEKVKVLQSMLPIKDEEVVLEQYEGYKDDPTVPGNSNTPTFATMVLRIHNERWEGVPFIMKAGKALNSRKAEIRVQFKDVPGDIFRCKKQGRNEFVIRLQPSEAMYMKLTVKKPGLEMSTVQSELDLSYGQRYQGVVIPEAYERLILDTIRGDQQHFVRRDELKAAWEIFTPLLHRIDDGEIKPIPYKPGSRGPAEADELLQNVGYVQTHGYIWIPPTL

SEQ ID NO: 109 - DNA, 1821 bp, Nicotiana tabacum
  CDS (88)..(1623)
ggcgtctcacaatttcttcagaaatcacaaggttggattgatcatacttcgctgagttgagggtgagctggttgtgaggccttgaagatggcagcatcatggtgcattgaaaaaaggggttctattcggctcgactcttttagagataatgataatatacctgaaactgggtgtctttccattattgttcttggtgcttctggtgatcttgccaagaagaaaacttttcctgcgctcttcaacctctaccggcagggatttctgcaatccaatgaggttcacatttttggctatgcaaggaccaaaatttctgacgacgacttgagaggccgtatccgtgggtatctttctcaggggaaagaaaatgaagaagaagtatcggagtttctgcagctgattaaatacgtcagtggctcttatgattctggggagggctttagtttactggacaaggctatagctgagcacgaaattgcaaaaaatagcacagaaggatcatccagaagactcttctactttgctcttcctccatcagtatatccctccgtttgcagaatgataaaaaattactgtatgaacaaatctgatcttggtggttggactcgcattgttgttgagaagcccttcggcaaggatttagcttcagctgagcaactaagttctcagataggagaactatttgatgaaccacaaatttaccggattgaccattatttgggaaaggagttggtgcagaatttgttggtgctgcgttttgcaaatcgcttctttttgccgctctggaatcgtgacaacattgataatatacagattgtctttagggaggactttggaactgaaggtcgctgtggatattttgatgaatatgggattatacgtgacattattcagaatcagctattgcaggtcctttgccttgttgccatggagaagcctgtgtcccagaagcccgaacacattcgggatgagaaagttaaggttcttcaatcaatgcttccaattaaagatgaagaggttgttcttggacaatatgaaggctataaggatgacccaacggttcctgacaactcaaatactcctacttttgcaactatggttttacgcatacacaatgaaagatgggaaggtgtgccctttataatgaaggctggaaaagcactaaattcaagaaaagcagaaatacgagtgcagtttaaggatgttcctggtgatatatttagatgtaaaaagcaggggagaaatgagtttgttatacgcctccagccttcagaagccatgtacatgaagcttacggtcaagaagcctgggcttgaaatgtcaactgttcaaagtgaattagacctgtcatataggcagcgttatcaaggggttgtcattccagaggcttatgaacgtctgattctcgacacaataagaggggatcagcagcattttgtgcgcagagatgagctcaaggccgcttgggagatttttaccccacttttgcatagaattgacgatggagaggtcaagccaattccatacaagccaggcagcagaggtcccgctgaagcagatgagttgctgcaaaatgtcggttacgttcaaactcatggctatatatgtattcctcccacattataagtttgcaatgcgtgtcgcgaattacatcctactgtcccctaaatatgagtattaccttgtaacttttgccaggtatgatcctgcctatgtgcaaactcgatagaagtaagattttcgtcggtataggagaaatatatctgcatgtaataatgtcatcttttttaagctaatgcatggaagtttggcggccgcgaattc

SEQ ID NO: 110 - protein, 511 aa, Nicotiana tabacum
MAASWCIEKRGSIRLDSFRDNDNIPETGCLSIIVLGASGDLAKKKTFPALFNLYRQGFLQSNEVHIFGYARTKISDDDLRGRIRGYLSQGKENEEEVSEFLQLIKYVSGSYDSGEGFSLLDKAIAEHEIAKNSTEGSSRRLFYFALPPSVYPSVCRMIKNYCMNKSDLGGWTRIVVEKPFGKDLASAEQLSSQIGELFDEPQIYRIDHYLGKELVQNLLVLRFANRFFLPLWNRDNIDNIQIVFREDFGTEGRCGYFDEYGIIRDIIQNQLLQVLCLVAMEKPVSQKPEHIRDEKVKVLQSMLPIKDEEVVLGQYEGYKDDPTVPDNSNTPTFATMVLRIHNERWEGVPFIMKAGKALNSRKAEIRVQFKDVPGDIFRCKKQGRNEFVIRLQPSEAMYMKLTVKKPGLEMSTVQSELDLSYRQRYQGVVIPEAYERLILDTIRGDQQHFVRRDELKAAWEIFTPLLHRIDDGEVKPIPYKPGSRGPAEADELLQNVGYVQTHGYICIPPTL

SEQ ID NO: 111 - DNA, 1539 bp, Chlamydia trachomatis
  CDS (1)..(1539)
atgctaggttgtaccttggaagaaattaaagactttggccccacattaccagcctgccctccctgtatcgtggttatttttggtgctacaggagacttgacctctaggaagctctttcctgctttatacaatttaacaaaggaaggacgtctatccgaaaactttgtttgtgttgggtttgctaggcgacctaagtctcatgagcaatttctcgaagaaatgaagcttgccgttcagcatttctctcactcatcggaaatagatattcgagtttgggaaagtctggaaaatagaatcttttaccaccaagctaatttttctgatgccgaaggctactctgctctgaaagcttatttggagcaactagatcaacaatatggaacacaagggaatcgtcttttttatttatcaacaccaccagattatttccaggaaatcatccgcaatttaaatcggcatcagctattctatcatgaacaaggagcacaacagccttggtctcggctaattatagaaaagccttttggagttaatttagaaacagctcgagagcttcaacaatgcattgatgccaatattgatgaagagtcggtttatcgaatagaccattatttaggaaaagaaacggttcaaaacattctgactattcgttttgctaatactctctttgagtcttgctggaattctcagtacatagatcatgtgcaaatcagcgttagcgaatcaattggtataggatctcgagggaatttcttcgaaaagtcgggcatgctacgagacatggtacagaatcatttgacgcagctgctatgtctactgactatggaacctccttctgaattttcttcagaagaaataaaaaaagaaaaaattaaaattctaaagaaaattcttcctatccgcgaagaagatgctgttcgtggccaatatggtgaagggattgtgcaagatgtttcagttctgggctatcgggaggaagaaaatgtcgatccgaattcttcagtagaaacctacgttgcattaaaattatttatcgacaatcctcgctggaaaggggttcccttttacttacaagcagggaaacgtcttactaaaagaacaacagatatcgctgtgatctttaaaaaatccagctacaatttattcaatgcagagaattgtcctttgtgtccgttagaaaatgatttacttattattcgtattcaaccggatgaaggtgttgcgctacaatttaactgcaaggttccaggaacaaataagctcgtacgtcctgtaaaaatggacttccgttacgacagctattttaatactgttactcccgaagcttatgaacggttactgtgcgactgtatccttggggacagaacgctattcactagcaatgaagaagtcttagcatcttgggaactattttctcctctattagaaaaatggtctcaagtacaccctatattccctaactatatggccggatctttacgtcctcaagaagctgatgaactattatctagagatggaaaagcttggcggccctattaa

SEQ ID NO: 112 - protein, 512 aa, Chlamydia trachomatis
MLGCTLEEIKDFGPTLPACPPCIVVIFGATGDLTSRKLFPALYNLTKEGRLSENFVCVGFARRPKSHEQFLEEMKLAVQHFSHSSEIDIRVWESLENRIFYHQANFSDAEGYSALKAYLEQLDQQYGTQGNRLFYLSTPPDYFQEIIRNLNRHQLFYHEQGAQQPWSRLIIEKPFGVNLETARELQQCIDANIDEESVYRIDHYLGKETVQNILTIRFANTLFESCWNSQYIDHVQISVSESIGIGSRGNFFEKSGMLRDMVQNHLTQLLCLLTMEPPSEFSSEEIKKEKIKILKKILPIREEDAVRGQYGEGIVQDVSVLGYREEENVDPNSSVETYVALKLFIDNPRWKGVPFYLQAGKRLTKRTTDIAVIFKKSSYNLFNAENCPLCPLENDLLIIRIQPDEGVALQFNCKVPGTNKLVRPVKMDFRYDSYFNTVTPEAYERLLCDCILGDRTLFTSNEEVLASWELFSPLLEKWSQVHPIFPNYMAGSLRPQEADELLSRDGKAWRPY

SEQ ID NO: 113 - DNA, 1581 bp, Vibrio vulnificus
  CDS (1)..(1581)
atgtcactgatagggtgggctcatcctttaagccgtatccaggcacacaacaagtacctcgtttttaagggaaagatgatggtaataccagaaaacagcagcatcgtaatttttggtgcttcaggtgatttaacatatcgcaagttgatccctgctttataccacctctacgcaagtaagcagctaccagaaaactttgctattttaggtgtcagccgcactgaatacagcgatgaatcttatcgcgaaaagttaaagcgctctcttcaggaaatggagaaaacggaaccagctattctggattcatttatcgaccatcttcactatcaagccatcaacacgtcagacacacaagactacgcgaagttggttgtacgtttagacgaattggccgctcaataccagttcgaacaacgtaatacactgttttatcttgccacaccgccaagcctttacagtgtcattccttcaagccttgctcatcacggtcttaacagtgaagaggatggttggaaacggctgatcattgaaaaaccgtttggttatgatttggcttcggcacgtcagctcgacaaagaaatacacgattgcttccaagagcatcagatctatcgcatcgaccactaccttggaaaagagaccgtgcaaaacttacttgttttccgtttctctaacgccatgtttgaacctctgtggaaccgcaacttcattgattatgtggaaatcacaggtgccgaattccttggcgtggaagagcgtggcggttattacgacggctccggcgctgtgcgcgatatgttccaaaaccatctactgcaagtattggcaatggtgggcatggaaccgcctgcacaaattaatgccgattccatgcgtgatgaagtagtgaaagttctgcagtgtttaaaaccgcttgaggaagatgatctgcgtaacaacctagttttgggtcaatacacagcatcagacgtgcgcggacaacatctgcttggctaccgtgaagaaaacggcgtagcggacgattctcgtactgagacttacattggtcttaaagcgtacatcaataactggcgttggaatggcgtgccattctacgtgcgcacgggtaagcgtcttccaactcgcgtaacagaagtggttatccacttcaaacaaacaccgcatccggtatttggccaaaacgccccagaaaacaaactgatcattcgtattcagcctgatgaaggcattcaaatgagcttcggtttgaaagaacctggtgcaggctttaaagcgaaagaagtgaagatgaacttccattatgcttcgttgcaagagacgcaaatgctgaccgcctatgagcgtctgcttcttgatgcgttaaacggcgatgcaacgctgtttgctcgcagcgatgcggtcgaagcgtgttggaaatacgttcaacctatcctcgatttcaaacaagatccacaagcactctttggttatgcctgcggcacttgggggccaaaagagtcagacgatttgctgcagcgtgacgatcgcgcgtggcgtttcccatgcaaaaacctaacagatacggactactgcgaactatga

SEQ ID NO: 114 - protein, 526 aa, Vibrio vulnificus
MSLIGWAHPLSRIQAHNKYLVFKGKMMVIPENSSIVIFGASGDLTYRKLIPALYHLYASKQLPENFAILGVSRTEYSDESYREKLKRSLQEMEKTEPAILDSFIDHLHYQAINTSDTQDYAKLVVRLDELAAQYQFEQRNTLFYLATPPSLYSVIPSSLAHHGLNSEEDGWKRLIIEKPFGYDLASARQLDKEIHDCFQEHQIYRIDHYLGKETVQNLLVFRFSNAMFEPLWNRNFIDYVEITGAEFLGVEERGGYYDGSGAVRDMFQNHLLQVLAMVGMEPPAQINADSMRDEVVKVLQCLKPLEEDDLRNNLVLGQYTASDVRGQHLLGYREENGVADDSRTETYIGLKAYINNWRWNGVPFYVRTGKRLPTRVTEVVIHFKQTPHPVFGQNAPENKLIIRIQPDEGIQMSFGLKEPGAGFKAKEVKMNFHYASLQETQMLTAYERLLLDALNGDATLFARSDAVEACWKYVQPILDFKQDPQALFGYACGTWGPKESDDLLQRDDRAWRFPCKNLTDTDYCEL

SEQ ID NO: 115 - DNA, 1476 bp, Photorhabdus luminescens
  CDS (1)..(1476)
atggcggttacttctacagctcaggcttgtgatttagtcatttttggcgctaaaggggatttggcacgccggaaattattgccttccctttatcagcttgagaaagcgggttatatccacccagaaacccggattatcggtgttggccgggctgattgggataaaaaagcttataccaaggttgttgaagaagctttaaatacattcttgccagaaaaattagattcagaattatggaagatattgagtgagcgtttggcgttctgcaatctggatgttaatcaaaaagaagactttgccaaattgaaggcaattcttaagcaggataatcggcctgcaatccattattttgcgatgccacccagtacttttggttcggtttgtcacggattgggccttgcagggctaaataaagagccaaatcgagttgtgatggaaaagcctttagggaccgatcttgaatcatccaaagccatcaatgatgaagtagctaaatatttcaatgagcgtcaggtttatcgcatcgatcattatctgggtaaagaaaccgtattgaatctgttggcgctgcggtttgccaattccttgtttgtgaataattgggataaccggacaattgatcatgtacaaattacagtagctgaagaagtcggtattgaaggccgttggggttattttgaccaagctgggcagatgcgcgatatgattcagaatcacctgttgcaaatattgaccatgattgctatgtctcctccggcagatctgacgacagaccgtatccgtgatgaaaaagtaaaagtattgcgttctctgcgctgtattgatcatacgaatgtgcgggagaagacggtacgaggtcaatacactgctggttttgttcaggggcataaggtaccggggtatctggaagaagagggggcaaaccagtccagccggacggaaacttttgtctctatccgtgtcgatattgatgactggcgttgggccggggttcctttctacctgagaaccggtaaacgtctgccaacgaaatgttccgaggtggtagtttatttcaaaaagcctgcactgaacttgttttctgagtcttatcaacaactaccgcagaataagctaacgattcgtttgcagccggatgaaggtattgatattgaagtgctgaacaaagctccggggctggaacacaagcatcgtctgcaaaccactaagctagatctgagtttctctgaaacgtttaaccatattccgttggcggatgcttatgagaggttactgctggaggctatgcggggtattcaggcgctatttgttcgtcgtgatgaagtggaagaagcgtggaaatgggttgattctattatgaatgcatgggcggcggataatgatgcgcctaagccttatcaggcggggacgtgggggccggtcgcttctgttgcgatgatcactcgcgatggtcgttcgtggaatgagtttgagtaa

SEQ ID NO: 116 - protein, 491 aa, Photorhabdus luminescens
MAVTSTAQACDLVIFGAKGDLARRKLLPSLYQLEKAGYIHPETRIIGVGRADWDKKAYTKVVEEALNTFLPEKLDSELWKILSERLAFCNLDVNQKEDFAKLKAILKQDNRPAIHYFAMPPSTFGSVCHGLGLAGLNKEPNRVVMEKPLGTDLESSKAINDEVAKYFNERQVYRIDHYLGKETVLNLLALRFANSLFVNNWDNRTIDHVQITVAEEVGIEGRWGYFDQAGQMRDMIQNHLLQILTMIAMSPPADLTTDRIRDEKVKVLRSLRCIDHTNVREKTVRGQYTAGFVQGHKVPGYLEEEGANQSSRTETFVSIRVDIDDWRWAGVPFYLRTGKRLPTKCSEVVVYFKKPALNLFSESYQQLPQNKLTIRLQPDEGIDIEVLNKAPGLEHKHRLQTTKLDLSFSETFNHIPLADAYERLLLEAMRGIQALFVRRDEVEEAWKWVDSIMNAWAADNDAPKPYQAGTWGPVASVAMITRDGRSWNEFE

SEQ ID NO: 117 - DNA, 1539 bp, Gloeobacter violaceus
  CDS (1)..(1539)
atgaccgcatcgttgactggaggattgagcgccaatccgttgcgccaggggctgcgcctggagcgcacgcccaagcctgccattttgactatcttcggggcctccggagatttgaccgtccgcaagctgatcccagccctttacgacctggcccgcgaccggcgattgccccctgaattcacggtcgtgggctatgcccgtcgcccctacagccacgaagaatttcgcgaaatgatgaaggaaggggtagccaagtattcgcgcagcaagctgggcaacctctgggaaagtttctccaagggcatctattacttccagggggacctcgacaatctccagaattttaaggacctcggcgaatttttgcagactctagatagcgagcgcggcaccctcggcaaccgggccttctacatggctaccgccccgagtttctttgcgcccatcatcgagaatctgggcggagcgggcctggcgggcgacgtgcgcaacacgcgcctggtgatcgaaaaacccttcggccacgacctggagtcggctcaaaatctcaacaaagtcgtccagcaagtctttcacgaaaagcaggtctaccgcatcgatcactacctgggcaaagagaccgttcagaatatcctggtcttccgctttgccaattcgatctgggaaccgctctggaacaaccgctacgtcgatcacgtgcagatcacggtagcagagacggtgggggtcgaaaaccgcgggccgtactacgacgaagccggcggcgcgctgcgcgacatgatccagaatcacctggtacagctgttggctctcaccgccatggagccgccctccgccttcgaggccgacaccgtgcgcgacgaaaaagtgaaagtcctgcgcgccacccaggtcggccaggggccgaacggccttgcggcagtccgcgcccagtacgccaacggctggatttcaggcgaaccggtgcacgcctaccgcgacgaaccccgggtcaaccccgacgttcagactgcgagctatattgccgccaaattcatgatcaacaattggcgctggaagggcgtgccgtttttgctgcgcaccggcaaacgcctcgccaagcgcgtcaccgaaattgccctgcaatttcgggaagtgccgcacctgctctttccgtcgagcagcgcgggccagctcagcccgaacatgctggtgctgcgcatccaaccggacgaaggcatttcgctgcgcttcgaggccaagcggccggtggccgacatcgccatgcgctcggtgaacatggactttcactacggcggcaccttcgaggtcgcctcgcccgaagcctacgagcggttgctgctcgattttctgctcggggatcagacgctgtttacccgcgcggacgaagtcgaggcggcctggaagatcgtcacaccgctcatcgagcgctgggaaatccagaaagccggcgatctcaattactacgacgccggttcctgggggccgagtgccgcgagtaagctgatggacaacggccgccgctggcggcgcctatag

SEQ ID NO: 118 - protein, 512 aa, Gloeobacter violaceus
MTASLTGGLSANPLRQGLRLERTPKPAILTIFGASGDLTVRKLIPALYDLARDRRLPPEFTVVGYARRPYSHEEFREMMKEGVAKYSRSKLGNLWESFSKGIYYFQGDLDNLQNFKDLGEFLQTLDSERGTLGNRAFYMATAPSFFAPIIENLGGAGLAGDVRNTRLVIEKPFGHDLESAQNLNKVVQQVFHEKQVYRIDHYLGKETVQNILVFRFANSIWEPLWNNRYVDHVQITVAETVGVENRGPYYDEAGGALRDMIQNHLVQLLALTAMEPPSAFEADTVRDEKVKVLRATQVGQGPNGLAAVRAQYANGWISGEPVHAYRDEPRVNPDVQTASYIAAKFMINNWRWKGVPFLLRTGKRLAKRVTEIALQFREVPHLLFPSSSAGQLSPNMLVLRIQPDEGISLRFEAKRPVADIAMRSVNMDFHYGGTFEVASPEAYERLLLDFLLGDQTLFTRADEVEAAWKIVTPLIERWEIQKAGDLNYYDAGSWGPSAASKLMDNGRRWRRL

SEQ ID NO: 119 - DNA, 1539 bp, Gloeobacter violaceus
  CDS (1)..(1539)
atggcaaccgattcgacgacgcccttcccaatcgccccaccggctggaccctgcgcgatggtcgtcttcggggcggctggagatcttaccggtcggctactggtgccggcgctctataacctggccgcgggcgggctattaggtgaaaaatttgtcttgatcgggctggcccgcgccccgctcaccgacacgaattttcggacacaactgggcgaggcgctgcagcgccatggcactgctgcagtcaatccggccgtctgggatgcccttgcgcagcgatttttttatctggaagccaacttcgaagctcccgatacctacgcccgcctgcggcagcggctggccgaggcggaagccgaattcaacacggacggcaacacgctattttatctggcgaccgcccctgagcacttcggcggcattgtcgagcagttgggctgggctgggctgtcccgcgaggagaccggtcactggcgacgcgtcgtcctcgaaaaacccttcggtcaggatctcgcctccgcccaagccctcaacgcccgcctccggcgcgacctctccgaaagccaggtctaccgcatcgatcactacctgggcaaagaaaccgtccagaacatcctggtcctgcgcttcgccaacggcctgttcgagcccctctggaaccgcaaccacatcgaccacgtgcagatcaccgtcgccgagagcgtcggggtcgaaaagcggggcggttactacgagcgggccggggcgctcagggacatggtgcccaaccatcttttccagttgctggccctcaccgcgatggagccgcccacctgcttcggggccgacgccgtgcgcaccgaaaagaccaagctgctggaagccgtccagaccctcaagcccgcccagatctccacccacgtcgtgcgcgctcagtacgccgcgggtacggtcggggagcgggcactgccggactaccgcgccgagccgcgggtggcgccggattcgaccaccgagacgttcgtcgccctcaaactcgccgtcgacaactggcggtgggcgggggtgcccttttatctgcgcaccggcaaggccctggccaggcgcagcaccgagatcgccatccgcttcaagcaggcgccctacgcgatgtttcgcgacacgccggtggagcgcctcacacccaactatctggtgctccacatccagccggaggagcgcatcagcctcgaattcggcgccaaagtgccgggaccggcggtgcgcatggccggcgtcggcatggacttttgctacaatcgccacttcggcggcgagcgggcgatcggctatgaaacgttgctctacgactgcatgatgggcgatgctaccctgtttcagcgctcggatacggtggaggcggcctggcaggtcgtcgaaccgatctttgctgcctggaacgattcaactgccgacctggtcacctatccggccggcagttggggtccgcagcaggcggaggagttgctcgggcgcgacggtcggcagtggcggagagcggaccatgattcttgcgggtga

SEQ ID NO: 120 - protein, 512 aa, Gloeobacter violaceus
MATDSTTPFPIAPPAGPCAMVVFGAAGDLTGRLLVPALYNLAAGGLLGEKFVLIGLARAPLTDTNFRTQLGEALQRHGTAAVNPAVWDALAQRFFYLEANFEAPDTYARLRQRLAEAEAEFNTDGNTLFYLATAPEHFGGIVEQLGWAGLSREETGHWRRVVLEKPFGQDLASAQALNARLRRDLSESQVYRIDHYLGKETVQNILVLRFANGLFEPLWNRNHIDHVQITVAESVGVEKRGGYYERAGALRDMVPNHLFQLLALTAMEPPTCFGADAVRTEKTKLLEAVQTLKPAQISTHVVRAQYAAGTVGERALPDYRAEPRVAPDSTTETFVALKLAVDNWRWAGVPFYLRTGKALARRSTEIAIRFKQAPYAMFRDTPVERLTPNYLVLHIQPEERISLEFGAKVPGPAVRMAGVGMDFCYNRHFGGERAIGYETLLYDCMMGDATLFQRSDTVEAAWQVVEPIFAAWNDSTADLVTYPAGSWGPQQAEELLGRDGRQWRRADHDSCG

SEQ ID NO: 121 - DNA, 1479 bp, Chromobacterium violaceum
  CDS (1)..(1479)
atggagactcgttctacccctaccccggccttcgacatggtgctgttcggcggcgccggcgacctggtgatgcgcaagctgctgccttcattgtaccaggcgcataacgccggcctgctcaacgaacagggccgcatcctggcgctgggccgcaaggacctgagccgcgacgactacctggcttccgtcgaaaagcagtcccgcatccatatcaagtcccacttcgacgatgccgcctggcagagcttctgtagccgcatcgactacctgcgcgtcgacgcctcccaggccgccgactacccggcgctggccgagaaggtcggcgacgacgccggcaaggtggtggtgtgctaccttgccaccgcgcccaatctgttcgccggcatctgcgaaaacctggccgcggtcggcctgaaccgccccaatgtgcgggtggtgctggaaaagccgctgggcaccgacctcgactcgtccaacgagatcaacgacgacgtcgcccgcttcttcaaggaagagcagctgtaccggatcgaccactacctgggcaaggagtcggtgcagaacctgatggccatccgcttcgccaacgcgctgttcgagccgctgtggcgccgcgaatggatacacgacgtgcagatcaccatttcggaagaactgggcgtcggcagccgcggcgatttctacgacggcaccggcgcgctcagggacatggtgcagaaccacctgctgcagctgctgtgcatcgtggcgatggagccgccggccaacctggaagccgacgccgtccgcgacgagaagctgaaggtgctgaaggcgctgcgcccgttcaccgagcacgatgtcgccgccaagaccgtgcgcggccagtacaaggccggcgccagcggcggccagccggtggtcggctaccaggacgaggccggcattcccgccggcagccagaccgagaccttcgtcgccatcaaggccgagatcgacaactggcgctgggccggcgtgcccttcttcctgcgcaccggcaagcggatgcaggaacgcctggccgagatcgtcatcaacttccgcgatgtgccgcaccaggtgttcaccggcccgctgggcggcagccaccacgccaaccggctggtgatccgcctgcagcccgaggaaagcatccgcctgtacttcctggccaaggagccgggcgacaccatgcgcctgcagccggcctacctggacctggacttctacaaggcgttcaaggtgcgccgcgccgacgcctacgagcgcctgctcttggacgtgatccgcggcaagctggcgctgttcatgcgccgcgacgagctgatcgaggcctggcgctgggtcgagcccatcatggacacctgggccgccagcaccaacaacccgcccaagcaatacaccgccggcagctggggcccggccgcgtccagcgcgctgctgtcgcgcgacggcatcagctggcacgaggagtgttaa

SEQ ID NO: 122 - protein, 492 aa, Chromobacterium violaceum
METRSTPTPAFDMVLFGGAGDLVMRKLLPSLYQAHNAGLLNEQGRILALGRKDLSRDDYLASVEKQSRIHIKSHFDDAAWQSFCSRIDYLRVDASQAADYPALAEKVGDDAGKVVVCYLATAPNLFAGICENLAAVGLNRPNVRVVLEKPLGTDLDSSNEINDDVARFFKEEQLYRIDHYLGKESVQNLMAIRFANALFEPLWRREWIHDVQITISEELGVGSRGDFYDGTGALRDMVQNHLLQLLCIVAMEPPANLEADAVRDEKLKVLKALRPFTEHDVAAKTVRGQYKAGASGGQPVVGYQDEAGIPAGSQTETFVAIKAEIDNWRWAGVPFFLRTGKRMQERLAEIVINFRDVPHQVFTGPLGGSHHANRLVIRLQPEESIRLYFLAKEPGDTMRLQPAYLDLDFYKAFKVRRADAYERLLLDVIRGKLALFMRRDELIEAWRWVEPIMDTWAASTNNPPKQYTAGSWGPAASSALLSRDGISWHEEC

SEQ ID NO: 123 - DNA, 1476 bp, Neurospora crassa
  CDS (1)..(1476)
atggagcagctcaaggacaacaccgtcatcgttgtccttggcgcctctggcgatctcgctaagaagaagacctaccgcaaccaatttttgcccaaggacatccggattgtgggctatgccagaactaaaatggaccacgacgagtacatccgccgcatcaagtcgtacatcaagactcccacgaaggagagcgagcagcagcttgaggagttctgctccatctgcacatacgtttccggccagtacgatcgcgacgactccttcctgcagctcaacaagcatttggaggaactggagcaaggaaggaaagagaacaaccgactcttctacatggctctgcctcccagcgttttcaccattgtttcacagcatctcaagaagtgttgctacccctccaggggcgttgcccgtgttattgtcgagaaaccctttggcaaggacttggcaagctctcgagaactgcagaagtctcttgagcccgactggaaggaagaggagatcttccgtatcgaccattatctaggcaaggagatggtgaagaacattctcattctgcgtttcggcaactccttccttggcgctacctggaacaggcatcacatcgacaacgtccaaattacattcaaggaacccttcggcaccgagggccgtggtggctacttcgacgagttcggcatcatccgcgatgtgatgcagaaccatctgttgcaggtccttacgttgcttgccatggaacgccccatctctttctccgctgaagatatccgtgatgagaaggtgcgggtcctccgcgccattccggcaatcgagcccaagaatgtcatcattggacagtacggcaagtcgcttgacggaagcaagcctgcttacaaggaagacgatacggtccccaaggattcccgctgccccactttctgtgcgctagttgcgtacatcaagaacgagcgttgggatggtgtacctttcatcatgaaggcaggcaaggccttgaacgagcagaagaccgagatccgcgtgcagttcaaggacgtcacatcgggcattttcaaggacattcctcgcaacgaactcgttatgcgcattcagcccaacgaaagtgtctacatcaagatgaactctaagcttcccggcctgagcatgcagactgttgtcaccgagcttgacctcacctacaggagacgcttctccgacctcaagatccccgaagcttacgagtcccttattctcgactgcttgaagggtgaccattccaactttgtccgtgacgatgagctcgatgccagctggagaatctttacccctttgctccactatctcgatgataataaggaaatcatcccgatggagtatccttatggttctcgcggcccggctgttttggatgactttacggcttcgtacgggtacaaattcagcgatgctgcgggctaccagtggcccacaacctccgccatggggtcgggcatgaagttgtag

SEQ ID NO: 124 - protein, 491 aa, Neurospora crassa
MEQLKDNTVIVVLGASGDLAKKKTYRNQFLPKDIRIVGYARTKMDHDEYIRRIKSYIKTPTKESEQQLEEFCSICTYVSGQYDRDDSFLQLNKHLEELEQGRKENNRLFYMALPPSVFTIVSQHLKKCCYPSRGVARVIVEKPFGKDLASSRELQKSLEPDWKEEEIFRIDHYLGKEMVKNILILRFGNSFLGATWNRHHIDNVQITFKEPFGTEGRGGYFDEFGIIRDVMQNHLLQVLTLLAMERPISFSAEDIRDEKVRVLRAIPAIEPKNVIIGQYGKSLDGSKPAYKEDDTVPKDSRCPTFCALVAYIKNERWDGVPFIMKAGKALNEQKTEIRVQFKDVTSGIFKDIPRNELVMRIQPNESVYIKMNSKLPGLSMQTVVTELDLTYRRRFSDLKIPEAYESLILDCLKGDHSNFVRDDELDASWRIFTPLLHYLDDNKEIIPMEYPYGSRGPAVLDDFTASYGYKFSDAAGYQWPTTSAMGSGMKL

SEQ ID NO: 125 - DNA, 1524 bp, Synechococcus sp.
  CDS (1)..(1524)
atggtcgccaccgccaccaatcccctgcgggtcggtctccgacaggaacgggtcatcgcaccgcaatgtctggtaattttcggcgccagtggtgacctgacccaccgcaagctggtccccgcgctgttcgaactgttcaagcagaggcgacttcccagtgaattcgcccttctcggctgcgcccgccggccctggagcgacgacgagtttcgcggaaaaatggccgaggccctggccagcaagatcgccgagaaccaggaagcctgggatcagttcgtctcgaagttgttctacgaacccgtcgatctgcagcaaccggaggatgtggttcgcctggggaaacgcctggaaaccgttgatcaacagtgcgccacccgcggcaaccgcaccttctatctctcggtgtcaccgaagttctacggcagtggctgtcgcgcgctagcggatgccggtctgctgaaggatcctcaacgcagccgcgtggtgatcgagaagcctttcggtcgtgactacggcagcgctcaagccctgaaccgtgttgtaaaaagctgcgggcaagagaatcagatcttcaggatcgaccattacctaggcaaggaaacggtccagaacatcatggtgctgcgctttgccaacaccattttcgaaccgatctggaaccggaactacatctccagtgttcagatcactgccgccgagaccgttggagtcgaggagcgggccgggtattacgagacctccggtgccctgcgggacatggtgcagaaccacctgacccagatgctggccatcacagccatggaaccgccaggtcgctttgacccggaggcgatccgcaacgaaaaggccaaggtgttgcaagcggcacgactggctgacgagcaggagccatggaactgctgcatccgcggtcagtacggccccggcggcagccatgacgctcccctggccggataccgccaggaacccggcgtcgatcccaacagcaccacggagacctacgtcgccatgaagctgttcgtcgacaactggcgttggcagggggtccccttctacgtccgcacaggcaagcggctggccaaacgcctcagcgaggtggtgctcaccttccgcgaagcaccagtgcatctcttcgatgcagccaccggcggccccacggccaaccagttgattctgcgcatccagcccgacgaaggggcggaattccgcttcgaagtgaaatcccccgggtccggcatgcgcagccgtccgatcgacatggagttctcctacgacgagtccttcggggagccctccgatgagggctatgtccgcctgctggcggacgccatgctcagcgatccgaccctgttcacccgcagtgacgaggtggaagcggcctggcgtctgtacaccccgctgctggagctgatcgaagacagcccttggcagctgccgatccatccctacgaatcccgcacctggggacctgccgccgctgatgccctgctggcccgtgacggactgctctggcgtcgtccctga

SEQ ID NO: 126 - protein, 507 aa, Synechococcus sp.
MVATATNPLRVGLRQERVIAPQCLVIFGASGDLTHRKLVPALFELFKQRRLPSEFALLGCARRPWSDDEFRGKMAEALASKIAENQEAWDQFVSKLFYEPVDLQQPEDVVRLGKRLETVDQQCATRGNRTFYLSVSPKFYGSGCRALADAGLLKDPQRSRVVIEKPFGRDYGSAQALNRVVKSCGQENQIFRIDHYLGKETVQNIMVLRFANTIFEPIWNRNYISSVQITAAETVGVEERAGYYETSGALRDMVQNHLTQMLAITAMEPPGRFDPEAIRNEKAKVLQAARLADEQEPWNCCIRGQYGPGGSHDAPLAGYRQEPGVDPNSTTETYVAMKLFVDNWRWQGVPFYVRTGKRLAKRLSEVVLTFREAPVHLFDAATGGPTANQLILRIQPDEGAEFRFEVKSPGSGMRSRPIDMEFSYDESFGEPSDEGYVRLLADAMLSDPTLFTRSDEVEAAWRLYTPLLELIEDSPWQLPIHPYESRTWGPAAADALLARDGLLWRRP

SEQ ID NO: 127 - DNA, 1455 bp, Rhodopirellula baltica
  CDS (1)..(1455)
atgtcacatacaattgtcatctttggtgccagcggcgacctgaccagccgcaaactggtcccggcactcttccgactcttctcacgcggacgcctgcccgactcgactcgcattgtcggtgtttcgcgaagtccctacgaacattccgagtggcgaaaatcgcttcgcgaaaccaccgccaaatttgtcggcaagtctttcagcgaagaagcctgggaatcattcgcaccgaacatctactaccagcccggcgacatcaaagacgcagagtcgtttcaatcgctggcgacgtttttggatgaaatcgaagaaggcaaatcgaccggtcgagtctactacctgtcgaccatgccacagttgtacgaagaagcgatccagcaactcggggccgcgggactcgcctgcgacaaaaccggaccgcgacgggtgatcatcgagaaaccgttcggcacggatctgaaaacggcccagcgtctgaacgaatcgatccacaacgtttttcgcgaagatcagatctaccggatcgatcattacctcggcaaagaaaccgtacagaacattttcgcgttgcgttttgccaacagtatcttcgaaccgctgtggaaccggaactacatcgaccacgtgcaaatcaccgtggccgaagaagtcgtcatcggccggcgagctggctactacgacaacagcggaatcctccgcgacatgttccagaatcatattctgcaactgatgatgatcacggcgatggaaccgccggcgaaatttgacgccgctttggttcgcgatgagaaagtcaaagtgttgcacagtgttcgcaagatgacgggtggcgacttcgcatctcaaaccgttcgcggccagtacgacggctacctgcaagaggaaggcgtcccggcgaacagccaaacggaaacctttgccgcgttgaaactgtactgcgacaactggcgatggcagggcgtgccgttcttcttgcgaagcggcaaaggcatgtcatgccgaacgacccagatcgtgatccagttcaaaaacgttccgcaccaattgtttggcggatcgaagaaggagaacaaacttggcaaccgattggtcattcaagtccaaccggccgaaggcatccaattgcacttcgaaaccaaggttgccgacgccggaatgaagacgcgaaccaaccacttggacttcaacttccaagattcgatcggcggccaagaaatgcccgacgcctatcagcgactgctgctggacgcggtgcaaggcgacgccagcctctttgctcgcggcgacgaagtcgaactggcctggagcatcatcgatccaatcatcgaagcgtggcgaagcccggccgctccgccactgcacacgtaccaaaccggcctttggggccccgaagaatgctcgcagtggctgttcgaccaaaaacgcgaatggttcgacgtctgcccagttatttaa

SEQ ID NO: 128 - protein, 484 aa, Rhodopirellula baltica
MSHTIVIFGASGDLTSRKLVPALFRLFSRGRLPDSTRIVGVSRSPYEHSEWRKSLRETTAKFVGKSFSEEAWESFAPNIYYQPGDIKDAESFQSLATFLDEIEEGKSTGRVYYLSTMPQLYEEAIQQLGAAGLACDKTGPRRVIIEKPFGTDLKTAQRLNESIHNVFREDQIYRIDHYLGKETVQNIFALRFANSIFEPLWNRNYIDHVQITVAEEVVIGRRAGYYDNSGILRDMFQNHILQLMMITAMEPPAKFDAALVRDEKVKVLHSVRKMTGGDFASQTVRGQYDGYLQEEGVPANSQTETFAALKLYCDNWRWQGVPFFLRSGKGMSCRTTQIVIQFKNVPHQLFGGSKKENKLGNRLVIQVQPAEGIQLHFETKVADAGMKTRTNHLDFNFQDSIGGQEMPDAYQRLLLDAVQGDASLFARGDEVELAWSIIDPIIEAWRSPAAPPLHTYQTGLWGPEECSQWLFDQKREWFDVCPVI

SEQ ID NO: 129 - DNA, 1524 bp, Prochlorococcus marinus
  Prochlorococcus marinus subsp
  CDS (1)..(1524)
atgtcctcaaccttaagtaatcctcttagattaggtttgcgacaagaaagagtgatatctccacaatgcctaataatatttggagctagtggagatcttactcataggaaacttatacctgccttatttgaactttatctgcaaagaaggatcccaagtgaattcgccatagttggatgtgcaagaaggccttggagtgatcaagattttaaggaaaaaatgaagggtaagttagctgatcaaatatctgacaatgaaaaggaatgggaacagttttcaaattatctattctacgaaccagttgatttgcagcaaagtgatcatgtagtaagactttccaaaagattaaatgagattgataaattacaggctacacatggaaataacaccttttacttatcagtatctccaaacttttatggaagtggatgtaaggctctaaaggctgctggattactagatgatccgaagaaaagtcgaatcgttattgaaaaaccctttggaagagattattcaagtgcgaagaaattaaataagatcgttcaaagttgtgcagatgaaagtcagatatatcgaatagatcattatttggggaaagagactgttcaaaacatacttgttatgaggtttgctaatactatttttgaacctatatggaataggaattatatttcaagtgttcaaataacatcatcggaaactgttggggttgaagatagagctggttattatgaaagctctggggctttaagagatatgctccaaaatcatttaactcaaatgcttgctgtaacagcgatggagcctcctggtaaatttgaacctgaggcaataagaaatgaaaaagcaaaagttcttcaagcttcaaaacttgccgatgagaatgaaccctggaattgctgtgtcagaggtcagtatgcacaaggaggtaatagtcttaaaagacttaaaggttatagggatgaagatggagtaaatttgaacagtacaacagaaacttatattgcaacaaaagtatttattgataattggcgatggcaaggagttcctttcttcttaagaacaggtaaaagactaccgaaaagacttggggaaattgtattaacatttaaagatgtcccagtacatttatttgaatcaacaataattaatcctgcgccaaatcagcttattcttaggattcagcctaatgaaggagctacttttaaatttgaagtcaaatcacctggatctgggatgaaagcaagaccagttgaaatggaattttcttacgatgaatcttttggagagccttctgacgaaggttatgtaaggttgttggctgatgccatgctctcagatcctaccttgtttacaaggagtgatgaggtagaagctgcttggaaactttatacaccattaatagaattaatggaagacgctccttggaagttacctattcataaatacgaatcaatgacttggggacctcctgaatcagatcaattactttccaaagataatattttttggcgcagaccctaa

SEQ ID NO: 130 - protein, 507 aa, Prochlorococcus marinus subsp
MSSTLSNPLRLGLRQERVISPQCLIIFGASGDLTHRKLIPALFELYLQRRIPSEFAIVGCARRPWSDQDFKEKMKGKLADQISDNEKEWEQFSNYLFYEPVDLQQSDHVVRLSKRLNEIDKLQATHGNNTFYLSVSPNFYGSGCKALKAAGLLDDPKKSRIVIEKPFGRDYSSAKKLNKIVQSCADESQIYRIDHYLGKETVQNILVMRFANTIFEPIWNRNYISSVQITSSETVGVEDRAGYYESSGALRDMLQNHLTQMLAVTAMEPPGKFEPEAIRNEKAKVLQASKLADENEPWNCCVRGQYAQGGNSLKRLKGYRDEDGVNLNSTTETYIATKVFIDNWRWQGVPFFLRTGKRLPKRLGEIVLTFKDVPVHLFESTIINPAPNQLILRIQPNEGATFKFEVKSPGSGMKARPVEMEFSYDESFGEPSDEGYVRLLADAMLSDPTLFTRSDEVEAAWKLYTPLIELMEDAPWKLPIHKYESMTWGPPESDQLLSKDNIFWRRP

SEQ ID NO: 131 - DNA, 1524 bp, Prochlorococcus marinus
  CDS (1)..(1524)
atgagcaccacgatcaccaaccctttacgggttggactacgtcaagagcgggttatcgctccgcagtgcctagtcatctttggtgcaagtggcgacctgacccaccgaaaattggttccagcccttttcgagctatacaaacaacggcggctaccgagtgaattcgccctacttggctgcgcgcgacgtccttggagcaacgaaatatttcgccaaaaaatggctgaagccctcggcgagactatcaacgaaaaccatcttgcttgggatcaattcgccgctggtcttttttacgaacctgtcgatctacagaagccagaagacctcatcaaactcagccatcggctggaagagattgatcgactccgcgccacccgcagcaatcgcaccttctatctttcggtgtcaccaaagttctacggcagtggctgcaaagctcttgctaatgccggtcttctaagtgatcccaaacgcagtcgagtggttatcgaaaaaccattcgggcgtgattacgccagtgctcagtctttaaatcaaatcgtccaaagctgtggccaagagaatcaaatcttccgcatcgaccactacctcggcaaagaaacagtccagaacatccttgtgctgcgattcgcaaataccatctttgaaccaatctggaaccggaattacatctccagcgttcaaatcacagccgctgaaaccgtaggggttgaagaacgagccaactactacgaatcgtcaggggccctgcgcgacatggtgcaaaaccatctcacccagatgctggccatcaccacgatggaaccgccagggcgctttgaccctgaggcaatccgcaatgaaaaagccaaggttttgctagcggctcgcctagcggatgagttggaaccttggaactgctgcatccgtggccagtacgcacctggcggcaccaaggaagctccgatagcaggctaccgacaggagccgggtgtcgatcccagcagcaccaccgagacctatgtagcgatgaaacttttcatcgacaactggcgctggcagggagtgcccttttacgttcgcactggcaaacgactggcaaagcgtcttagtgaagtggttctcacctttcgagaagcacccgtgcatcttttcgatgccgctgggggcagccctacagcgaaccaactcatcctgcgaatccaaccggatgaaggagccgagtggcgctttgaggtgaagtcacctggttcaggcatgcgcagccgaccagtagagatggaattctcctatgacgaatccttcggtgagccatccgatgagggatacgtccgacttttagccgatgccatgctcagtgacccaactttattcacccgcagtgatgaggttgaagcagcgtggcgcctttacacccctctcctggaactgattgaagacagcccatggcaattgcccattcatccctatgaatcacgtacctgggggcccgctgctgccgataccctgcttgccaatgacggattgctctggcgccgaccctga

SEQ ID NO: 132 - protein, 507 aa, Prochlorococcus marinus
MSTTITNPLRVGLRQERVIAPQCLVIFGASGDLTHRKLVPALFELYKQRRLPSEFALLGCARRPWSNEIFRQKMAEALGETINENHLAWDQFAAGLFYEPVDLQKPEDLIKLSHRLEEIDRLRATRSNRTFYLSVSPKFYGSGCKALANAGLLSDPKRSRVVIEKPFGRDYASAQSLNQIVQSCGQENQIFRIDHYLGKETVQNILVLRFANTIFEPIWNRNYISSVQITAAETVGVEERANYYESSGALRDMVQNHLTQMLAITTMEPPGRFDPEAIRNEKAKVLLAARLADELEPWNCCIRGQYAPGGTKEAPIAGYRQEPGVDPSSTTETYVAMKLFIDNWRWQGVPFYVRTGKRLAKRLSEVVLTFREAPVHLFDAAGGSPTANQLILRIQPDEGAEWRFEVKSPGSGMRSRPVEMEFSYDESFGEPSDEGYVRLLADAMLSDPTLFTRSDEVEAAWRLYTPLLELIEDSPWQLPIHPYESRTWGPAAADTLLANDGLLWRRP

SEQ ID NO: 133 - DNA, 1521 bp, Prochlorococcus marinus
  CDS (1)..(1521)
atgataccgactacaaacccattgagagttggtcttagacaagagagggtaatttcacctcagtgtttaattatttttggggccagtggagatttaactcataggaaacttgtccctgcccttttcaagctattcaaacaaagacgcttgcccagtgaatttgcattactaggttgcgctagaagaccttggagtgacattgagttccgaaaaaaaatgtcagtttctcttaaagatgaaatcaaattaaatccaaatgaatgggaagaattcataactcgtcttttctatgaaccagtcaatcttgaacgaccagaagatcttgtaaaactaggtacaaggctcgaagaaatagaccggataaaagctacccatgcaaatagaaccttttatttatctgttgcaccaaaattctatgcaagtggttgcaaagctttagcagatgcaggccttctcaaagacccacgaagaagcagagtggttatcgagaaacctttcgggagggattacagaagcgctcaaagtttaaatcgtattgttcagaattgtgctcttgaaagtcaaatctttcgcatcgatcattatctagggaaagagactgttcagaacattctggttctaagatttgcaaacacaatttttgaaccaatttggaacagaaattatatatctaatgttcaaataacttcagctgaaacagtaggagtcgaagatcgagcaggctattacgaaagttcaggagcattaagggatatggtgcagaatcatttaacgcaaatgcttgcaattactgcaatggaaccacctggtcattttgatccagaagccattaggaatgaaaaagccaaagtactgcaagctgctcatttagctaatgaacttgagccttgggaatgttgtgtaagaggccaatattcaaaaggtggctctaagaaaagaccattgattggttaccgagatgaacctggtgttaatccaaatagcacaactgaaacctatgttgctatgaagcttttcattaataattggcgatggcaaggagtccctttttatattcgtactgggaaaagattggcaaaaagaactagtgaagtagttttaacctttagagaggcacctgttcaccttttcgatgcggcaggggggacaccaacatctaatcaactagtcctaagaatccaacctgatgaaggagctgagttcaagtttgatgtgaagtctccaggttctggaatgaggagcaggcctgttgaaatggaattctcttatgatgaatcatttggagaaccttcagacgaaggatatgtaaggcttttagctgatgcaatgcttggagatcctactcttttcacgagaagcgatgaggtagaagccgcttggcgtttatatactcctcttttagaaataattgaagatagtccttggcaacttccaacttatccttatgaatccagaacttggggcccttcagaagctgatgcattactagctaaagatcaattactttggagaagaccctaa

SEQ ID NO: 134 - protein, 506 aa, Prochlorococcus marinus
MIPTTNPLRVGLRQERVISPQCLIIFGASGDLTHRKLVPALFKLFKQRRLPSEFALLGCARRPWSDIEFRKKMSVSLKDEIKLNPNEWEEFITRLFYEPVNLERPEDLVKLGTRLEEIDRIKATHANRTFYLSVAPKFYASGCKALADAGLLKDPRRSRVVIEKPFGRDYRSAQSLNRIVQNCALESQIFRIDHYLGKETVQNILVLRFANTIFEPIWNRNYISNVQITSAETVGVEDRAGYYESSGALRDMVQNHLTQMLAITAMEPPGHFDPEAIRNEKAKVLQAAHLANELEPWECCVRGQYSKGGSKKRPLIGYRDEPGVNPNSTTETYVAMKLFINNWRWQGVPFYIRTGKRLAKRTSEVVLTFREAPVHLFDAAGGTPTSNQLVLRIQPDEGAEFKFDVKSPGSGMRSRPVEMEFSYDESFGEPSDEGYVRLLADAMLGDPTLFTRSDEVEAAWRLYTPLLEIIEDSPWQLPTYPYESRTWGPSEADALLAKDQLLWRRP

SEQ ID NO: 135 - DNA, 1488 bp, Haemophilus ducreyi
  CDS (1)..(1488)
atgaatatagaaaatagttgtatcgtaatttttggtgcatcaggggacttaacattccgtaaacttatcccagcactatataatctttttaaagtaggtcggttaggcgaacatttttctgttttaggtgtttcacgatcagacctaactcacgattcttttagacaaaaaatgcgtgaagcattaatcaaatatgagcaagcaagcgggcagtttttagatgatttttgcaatcacttgtattatcaagcaatcaacaccgctgatccggacgattatgccaaactattaccttgtttagatgaattacacaataaatacggtagctgtggtaacactttatattacctttcaacaccgcctagtttatacggcattatccctgaatgcttggcggctcacggcttaaccactgaagaatatggttggaaacggattatcatcgaaaaaccatttggttacgatattaaaacagccaaacaactcgatgagaaaatacatcattattttgaagaacatcaaatttaccggatcgatcattatcttggtaaagaaaccgtgcaaaatttattagtactccgtttctcaaacggtttatttgaaccactttggaatcgtaattttattgaatatgtagaaattaccggtgcagaatcattaggtgttgaagatcgtggtggttattatgatggatctggtgcaatgcgtgatatgttccaaaaccatttactacaagtattagcaatggttgccatggaacctccggccattattaatgctaactcaatgcgtaatgaagtagcaaaagtcttatatagcttacgtccattaagcactgaagacgtcaaaaataatgtggtacttggtcaatatacctccggtgaaattgatgacttagttgtacccggttatactgaagaaaatggcgttcccaacgattcaaatacagaaacttatttagccgtaaaatgcgaaattgataactggcgttgggccggcgtgccattttatgtgcgaacaggtaagcgtttgcctactcgggtaactgaaatcgtaatccacttcaaaacgactccacatccagtctttagccaaaatgcgcctgaaaataaattaattatccgggtacaacctgatgaaggtatttctatgcggtttggtttgaaaaaacccggtgctggttttgaggcgaaagaagtctctatggattttcgctattctgatttaagctctgcttcaagtttattaaccgcttatgaacggttactattagatgcattaaaaggagatgcgaccctatttgcccgaaccgatgccgtacatgcctgttggcatttcgtacagccgattctagactataaggcagaacgtggccgagtgtatgaatatgaagcaagcagttgggggcctaaagaagctgataaactgattgcacgcaatggcaaagtatggcgtaaaccgtctggaatgatgaagaaaaaaatatag

SEQ ID NO: 136 - protein, 495 aa, Haemophilus ducreyi
MNIENSCIVIFGASGDLTFRKLIPALYNLFKVGRLGEHFSVLGVSRSDLTHDSFRQKMREALIKYEQASGQFLDDFCNHLYYQAINTADPDDYAKLLPCLDELHNKYGSCGNTLYYLSTPPSLYGIIPECLAAHGLTTEEYGWKRIIIEKPFGYDIKTAKQLDEKIHHYFEEHQIYRIDHYLGKETVQNLLVLRFSNGLFEPLWNRNFIEYVEITGAESLGVEDRGGYYDGSGAMRDMFQNHLLQVLAMVAMEPPAIINANSMRNEVAKVLYSLRPLSTEDVKNNVVLGQYTSGEIDDLVVPGYTEENGVPNDSNTETYLAVKCEIDNWRWAGVPFYVRTGKRLPTRVTEIVIHFKTTPHPVFSQNAPENKLIIRVQPDEGISMRFGLKKPGAGFEAKEVSMDFRYSDLSSASSLLTAYERLLLDALKGDATLFARTDAVHACWHFVQPILDYKAERGRVYEYEASSWGPKEADKLIARNGKVWRKPSGMMKKKI

SEQ ID NO: 137 - DNA, 1497 bp, Candidatus Blochmannia floridanus
  CDS (1)..(1497)
atgcggtcaaaaacaactaccactcaagcttgtaatttcattatttttggagctaaaggagatttagctcgtaggaaattaattcctgcgctatatcaattagagaaaatcggttctatacatcctagaacttttatattaggagtaggtagagcggaatgggatttattaacatatattaaaattgtgcgttcttctttagagagatttatgaaagaatctattaatgaaaatatatggtgtcgtttttctaaaagatttgatttttgtaatttagatgttaatcaaacggaacaatttgtacatgtgctgaataaattaaaaaatttagatttattgacaataaattattttgcaatgcctcctcatacatttggatctatttgtaaaggattaagtttagtgggtttaaataaagaaagaaatagaatagtgatagaaaagccattaggaatgaactttgattctgctcgtgttattaattctcaagtatctaaatattttcatgaaactcaaatttatcgggtagatcattatttaggaaaagaagctattttaaatttgttggtattacgttttgcaaattctgtatttttttcaaattgggataacaataccattgatcatgtacaaattactgtttcagaagaggttggaattgaaggtcgttggggttattttgatgctatggggcaaatgcgtgatatggtacaaagtcatttattacaaattcttactatcattgctatgtctcctccttttgatttaagtgctgattgtattcgggacgaaaaagttaaagtgttacgttcattgcgtatgattaatactaatacgatacatgaaattgcggtacgaggtcaatatactgctggttttattaatggtcaaccagtaccaggatatttagaggaaataggttctaacaaggatagtaaaacggaaacatttgtatcgattaaagtgaatatagataattggaggtggtttggagtgcctttttatttacgtactggaaaaagattagcaatgaaatattctgaagttgttatatattttaaaaaaccaatattgaatttatttaaagattcttattcaattttacctaataataaattaattattcgattacaaccatatgaaggaatagatatgcagattctaagtaaaataccgggattaggtaataagaatcgtttaaaaattactaatttgaatttaaatttgaggaaaatattttccggagaatacatattagatgcttatgaacgattattattagaggtaatgcgtgggattcaagtattatttgtacgttatgacgaaatagaggattcatggaggtgggttgattctgttatagaggcatggtctttagttgatggtgttccaaaattatataaagctggtacatggggtccgagtgaatctacagaaatgattcgtaaaggaaatcatcattggaataaatgtacgttgaaatatacgaatatttga

SEQ ID NO: 138 - protein, 498 aa, Candidatus Blochmannia floridanus
MRSKTTTTQACNFIIFGAKGDLARRKLIPALYQLEKIGSIHPRTFILGVGRAEWDLLTYIKIVRSSLERFMKESINENIWCRFSKRFDFCNLDVNQTEQFVHVLNKLKNLDLLTINYFAMPPHTFGSICKGLSLVGLNKERNRIVIEKPLGMNFDSARVINSQVSKYFHETQIYRVDHYLGKEAILNLLVLRFANSVFFSNWDNNTIDHVQITVSEEVGIEGRWGYFDAMGQMRDMVQSHLLQILTIIAMSPPFDLSADCIRDEKVKVLRSLRMINTNTIHEIAVRGQYTAGFINGQPVPGYLEEIGSNKDSKTETFVSIKVNIDNWRWFGVPFYLRTGKRLAMKYSEVVIYFKKPILNLFKDSYSILPNNKLIIRLQPYEGIDMQILSKIPGLGNKNRLKITNLNLNLRKIFSGEYILDAYERLLLEVMRGIQVLFVRYDEIEDSWRWVDSVIEAWSLVDGVPKLYKAGTWGPSESTEMIRKGNHHWNKCTLKYTNI

SEQ ID NO: 139 - DNA, 1548 bp, Bos indicus
  CDS (1)..(1548)
atggcagagcaggtggctctgagccagacacagacgtgtgggatactgtgggaagagctgtgccaaagctattctttccatcagtcggatacacacatattcatcatcatgggtgcatcgggtgacctggccaagaggaatatctaccccaccatctggtggctgttccaggatggccttctgccaaaagataccttcattgtgggctacaccgactcccacttcacagtggccaacatccgcaagcagagtgagcccttcttcaagtccaccccagaggaggagcccaagctggaggagttctttgcccacagctcctacatggccagccagtatgatgacgtggcttcctacgagcacctcaacagtggcatgaacgctctccaccagggtccgcaggccaactgcctcttctacctggccttgctccccagcggctacaggactgtcaccaagaacatctgtgacacctgcacgagccagacaggctggaaccgcatcatcgtggagaagccgtttgggagggacctgcagagctccaaccagctgtccaaccacatcgcctccctgttccacgaggaccagatctaccgcatcgaccactacctgggtaaggaggtagtccagaacctcatggtgctgaggtttgtcaacaggatcttaggccccatctggaaccgggacaacattgcttgcatgagcttcaccttcaaggagccatttggcactgagggccggtggagctacctcagtgaatctgggatcatctgggaggtgatgcaaaatcccctcctccagatcctgtgtctggtggccatggagaagcccatctccaccaactcagataacatccgtgatgataaggtcagggtgttgaaatgtatatcaaaggtgcaggtgagcaatgtggtcctgagccaatatatggagaaccccactgaagaaggtgaggccaccagagggtacccagaggaccccagggtgccccatgggtccaccactgacacctttgcagcagctgtcctctatgtggaaaatgagcgctgggacggggtgcccttcatcctgcgctgcggcaaagccctgaatgagcgcaaggccgaggtgcgcctgcagtttcgtgacgtggccggggacatcttccggcagcagtgcaagcgcaacgagctggtaatccgtgtgcagcccaacgaggccgtgtacaccaagatgatgaccaagaagcctggcatgttcttcaaccccgaggagtcggagcttgacctgacctatggcaaccgatacaagaacgtgaagttccctgacgcctacgagcgcctcatcctggacgtcttttgcgggagccagatgcacttcgtgcgtagtgatgaactgcgggaggcctggcggatcttcactccactgctccaccacattgaacgcgagaaggcccggcccatcccgtacgtgtacggcagccggggccctgtggaggcagacgagctgatgaagcgtgtgggcttccagtacgagggcacctacaagtgggtgaaccctcacaagctctga

SEQ ID NO: 140 - protein, 515 aa, Bos indicus
MAEQVALSQTQTCGILWEELCQSYSFHQSDTHIFIIMGASGDLAKRNIYPTIWWLFQDGLLPKDTFIVGYTDSHFTVANIRKQSEPFFKSTPEEEPKLEEFFAHSSYMASQYDDVASYEHLNSGMNALHQGPQANCLFYLALLPSGYRTVTKNICDTCTSQTGWNRIIVEKPFGRDLQSSNQLSNHIASLFHEDQIYRIDHYLGKEVVQNLMVLRFVNRILGPIWNRDNIACMSFTFKEPFGTEGRWSYLSESGIIWEVMQNPLLQILCLVAMEKPISTNSDNIRDDKVRVLKCISKVQVSNVVLSQYMENPTEEGEATRGYPEDPRVPHGSTTDTFAAAVLYVENERWDGVPFILRCGKALNERKAEVRLQFRDVAGDIFRQQCKRNELVIRVQPNEAVYTKMMTKKPGMFFNPEESELDLTYGNRYKNVKFPDAYERLILDVFCGSQMHFVRSDELREAWRIFTPLLHHIEREKARPIPYVYGSRGPVEADELMKRVGFQYEGTYKWVNPHKL

SEQ ID NO: 141 - DNA, 1485 bp, Bacillus anthracis
  CDS (10)..(1485)
ttggaatcaatgacctttgttttatttggagcgacaggggacttagcgaaacgcaaaatttaccccgcactatataacttatatagagatcaaaagcttccaaagcaaatatccgttatcgggcttgggagacgtgaagtatctcatgtagattttcaaaaaagaataaaagaatcaatagagacgttttctcgtcatagagaagaaggtactccagaactcgaaggttttttagataattttcgctattgtccattagatgtgagtaagccggaagactatgagagattattacaagtcgttcgtgaaagggaagaagagctacatataaaagggaatagaatgttctatctttccggtgctcctgaattttttgagacaatcgctttaaatattaaggaaagcggacttgataaaacggatggatggaaacgcctaatgattgagaaaccgttcgggcacgaccttacatctgctcgtgagctgaatgataagcttagtcgcacgtttgaagaagacgagatataccgtattgatcattatttaggtaagccgatgattcaaaaccttgaagcactagagtttgcaaatcctgttttacaatcgatttggaataaagaacatatagcgaatgtacaaatcacagcgagtgaaacagttggtgttgaagaaagggcaggatattatgatcaggcaggagccattcgagatatggttcaaaatcatatgttacaaatattaatgatgactgctatgaatttgccggaaaaggttaatgcatgtgaaattcgagaggaaaagcgaaaggtaatggaggcgcttcgtaaagtgaaaaaagaagacgttcaaaaccatatcattcgcggacaatatggtgcaggtgagataaatggcgggcaagttgtagcatataaagaggagccaggagtaaatccctcttctaatatagacacatttattgctgctcgcttgtggatcgataatccattttggactggcgttcccttttatatacgaacaggcaaacgaatgaaagaaaagtctactcgtattgtaatcgaatttaaaaatacgttaaaacagcaatatcaagatagtaatccaaatgcagcacctaacttgttaataattgaaattagcccaggtgagaacgtttcattacagttaaatagtaaaaatccattgaaaaatggagaaattgaaccgatccgtattaactttacttgtgagcaagcggatgtgggagtacctgaagcgtatgaaagactcattcatgatgctgtgagtggagacgctacattctttgcacattggagagaagttgaattgtcatgggaatgggtacaaccaattcttgaagcattcgaggaaaacttattaccacttcatgaatatgagtctggttcatatggtccagaggcatctaatgaattattgcaagaaagtggatttaaatggtggttagatcaagaaacgaaaaaatga

SEQ ID NO: 142 - protein, 491 aa, Bacillus anthracis
MTFVLFGATGDLAKRKIYPALYNLYRDQKLPKQISVIGLGRREVSHVDFQKRIKESIETFSRHREEGTPELEGFLDNFRYCPLDVSKPEDYERLLQVVREREEELHIKGNRMFYLSGAPEFFETIALNIKESGLDKTDGWKRLMIEKPFGHDLTSARELNDKLSRTFEEDEIYRIDHYLGKPMIQNLEALEFANPVLQSIWNKEHIANVQITASETVGVEERAGYYDQAGAIRDMVQNHMLQILMMTAMNLPEKVNACEIREEKRKVMEALRKVKKEDVQNHIIRGQYGAGEINGGQVVAYKEEPGVNPSSNIDTFIAARLWIDNPFWTGVPFYIRTGKRMKEKSTRIVIEFKNTLKQQYQDSNPNAAPNLLIIEISPGENVSLQLNSKNPLKNGEIEPIRINFTCEQADVGVPEAYERLIHDAVSGDATFFAHWREVELSWEWVQPILEAFEENLLPLHEYESGSYGPEASNELLQESGFKWWLDQETKK

SEQ ID NO: 143 - DNA, 1536 bp, Chlamydophila caviae
  CDS (1)..(1536)
atgacaagtaatgaaaataaagatggcgggaaaaccttgctcccatgtcctccctgtgtgatggtaatcttcggagctaccggagatcttacagcgcgcaagttattcccagcattgtatcatcttattaaagagggtaggctgtctgaaaactttgtctgcgtaggttttgctagaagaaagaaaagccatgaggaatttcgtgaagaaatgaaacaggcaatacaaaacttttcacgtgctcaagagcttgatatccgcatttgggaagagtttgaatcacgtatattttatcacgaatccaacttctcttctcccgagggctacgcctcattaaaagagagacttgaggatattgataagaaatataagacacaagggaatcggctattttacttatcaacgcctccagagtatttccccgagattatcgaaaatattaataagcataagcttttttatcatgatcaaagcgaaggcaagccatggtctcgagtgattatagaaaaaccctttggtgtggatctacaaagcgctaaagaactacaaaagtacatagatgataatctagatgaagattctgtctatcgtatcgatcattatctggggaaagaaactgtacagaatattcttacgatacgttttgcaaatactctatttgagtcttgttggaattctcaatacattgatcatgtgcaaattagcgtgagtgaatctataggcataggcacacgagggaacttctttgaaaaatctggaatgcttcgtgatatggtgcaaaaccatatgatgcagcttttatgtctattaactatggaacctccttcagtattcaattctgaagaaattaaaaaagaaaagatcaatattcttaagaaaatccgtccatttgctaaagaagatattattcgtggacaatatggtccgggagaagtacaagatgtgtctgttcttggctatcgtgaagaagacaatgtagctccagattctaatgtggagacttatgtagcgttaaagatgtttattgataacccacgttggttgggagtgcctttttatcttcgagccggtaaacgtctttctaaacgctctacagatatctctatcattttcaaaaagtctttgcccagcttatttacagcggaatcttgtcccgtatgtcctttagaaaatgatctgctaattatccgtatacaaccggatgaaggcgtggccttgaaatttaactgtaaagttcctggaatgaataatatcgtacgtcctgtgaaaatggattttcgctacgatacgtatttcaagacaacggcgccggaagcttacgagagattgctttgtgactgtattctaggcgataggattctatttacctgtagtgatgaagttatggattcttgggagctctttacaccgattttaaagcgatgggagcaagattcctcagatgcgcatttccctaattatgttgctggatcttcaggtcctaaggaagcagaggaattactacaagctgatggaagaagttggcgtcccctgtaa

SEQ ID NO: 144 - protein, 511 aa, Chlamydophila caviae
MTSNENKDGGKTLLPCPPCVMVIFGATGDLTARKLFPALYHLIKEGRLSENFVCVGFARRKKSHEEFREEMKQAIQNFSRAQELDIRIWEEFESRIFYHESNFSSPEGYASLKERLEDIDKKYKTQGNRLFYLSTPPEYFPEIIENINKHKLFYHDQSEGKPWSRVIIEKPFGVDLQSAKELQKYIDDNLDEDSVYRIDHYLGKETVQNILTIRFANTLFESCWNSQYIDHVQISVSESIGIGTRGNFFEKSGMLRDMVQNHMMQLLCLLTMEPPSVFNSEEIKKEKINILKKIRPFAKEDIIRGQYGPGEVQDVSVLGYREEDNVAPDSNVETYVALKMFIDNPRWLGVPFYLRAGKRLSKRSTDISIIFKKSLPSLFTAESCPVCPLENDLLIIRIQPDEGVALKFNCKVPGMNNIVRPVKMDFRYDTYFKTTAPEAYERLLCDCILGDRILFTCSDEVMDSWELFTPILKRWEQDSSDAHFPNYVAGSSGPKEAEELLQADGRSWRPL

SEQ ID NO: 145 - DNA, 1524 bp, Streptomyces avermitilis
  CDS (1)..(1524)
atgtcgagcagcaacccgctgcgtgaccccgcagaccgacggctcccgcgtatcgcggggccgtcgggcctggtcatcttcggcgtcacgggcgatttgtcacgtaaaaagctgatgccagccgtgtacgatctcgccaaccgcgggctgctgccgccgggcttctcgctcgtcggcttcgcccgccgcgactgggagcacgaggacttcgcccaggtcgtccacgacgccgtcaaggaacacgcccgtacggagttccgcgaggaggtctggcagcagctcatccaggggatgcgcttcgtccagggcaccttcgacgacgacgacgccttcgagcggctgcgcgacaccatcggggaactggacaaggcacagggcacgggcggcaacttcgccttctacctgtccgtgccgccgtccgccttcccggtggtcatccagcagctcaagaagcacggcctggccgaccagtcggacggctcctggcgccgcgcggtcatcgagaagcccttcggacacgacctcaagtcggccgaggagctcaacgcgatcgtccacgaggtcttcggctcggaccaggtcttccgcatcgaccactacctgggcaaggagaccgtccagaacatcctggcgctgcgcttcgccaacacgatgttcgagccgatctggaaccggtccttcgtggaccatgtgcagatcaccatggccgaggacatcggtatcggcggccgcgccggctactacgacggcatcggcgccgcccgtgacgtcatccagaaccacctgctccagctgatggcactgaccgccatggaggagcccgcctccttcgacgcggacgcgctcgccgccgagaagaccaaggtgctcggcgccgccaagctgccgaaggacctgagcaagaacaccgtccgcggacagtacgcggccggctggcagggcggcgagaaggtcgtcggctatctccaggaagacggcatcgaccccaagtcgaagaccgacacctacgcggccgtcaagctcgaggtggacaaccgccgctgggcgggcgtccccttctatctccgtaccggcaagcgcctgggccgccgcgtcaccgagatcgcggtcgtcttccagcgcgccccgcactcccccttcgaccacacggcgacggaggagctcggccagaacgcgatcgtcatccgcgtccagcccgacgagggcatcaccgtccgcttcggctccaaggtgcccggcacctcgatggagatccgggacgtctcgatggacttcgcgtacggcgagtcgttcaccgagtccagcccggaggcgtacgagcggctgattctggacgtgctgctcggcgactcgaacctcttcccgcgcaccgaggaggtcgagctgtcctggaagatcctcgacccgatcgaggagcactgggacaagcacggcaagcccgcgcagtaccccgcgggcacgtggggtcccgtcgaggcggacgaaatgctcgaacgagacggacggagctggcgtcgcccatga

SEQ ID NO: 146 - protein, 507 aa, Streptomyces avermitilis
MSSSNPLRDPADRRLPRIAGPSGLVIFGVTGDLSRKKLMPAVYDLANRGLLPPGFSLVGFARRDWEHEDFAQVVHDAVKEHARTEFREEVWQQLIQGMRFVQGTFDDDDAFERLRDTIGELDKAQGTGGNFAFYLSVPPSAFPVVIQQLKKHGLADQSDGSWRRAVIEKPFGHDLKSAEELNAIVHEVFGSDQVFRIDHYLGKETVQNILALRFANTMFEPIWNRSFVDHVQITMAEDIGIGGRAGYYDGIGAARDVIQNHLLQLMALTAMEEPASFDADALAAEKTKVLGAAKLPKDLSKNTVRGQYAAGWQGGEKVVGYLQEDGIDPKSKTDTYAAVKLEVDNRRWAGVPFYLRTGKRLGRRVTEIAVVFQRAPHSPFDHTATEELGQNAIVIRVQPDEGITVRFGSKVPGTSMEIRDVSMDFAYGESFTESSPEAYERLILDVLLGDSNLFPRTEEVELSWKILDPIEEHWDKHGKPAQYPAGTWGPVEADEMLERDGRSWRRP

SEQ ID NO: 147 - DNA, 1647 bp, Streptomyces avermitilis
  CDS (1)..(1647)
atgagcaagactccttcgaccgggacgccgggcaccgagaagcctgtcaccgggacgccggccaccgagacgcctgtcacggaggctccggtcaccgaggctccggtcaccgaggcgtcggccgtcgactgggccaaccccctgcgcgacccccgggaccgccgtctcccccgtatcgcgggcccctcgggcctcgtcatcttcggggtcaccggcgacctgtcccgcaagaagctgatgccggccatctacgacctggccaaccgcggtctgctcccgccgggcttctcgctcctcgggttcgcccgccgggactgggaggaccaggacttcgcgcaggtggtgcacgactcggtgcgcgagcacgcccgcacggagttccgcgaggaggtctggcagcagctcgccgagggcatgcggttcatcccgggcgacttcgacgacgacatggcgttcaagcaactgcgcgcgtccgtcgacgagctggacgcctcccgcggcaccagcggcaactacgccttctatctctcggtaccgccgaagttcttcccgaaggtcgtccagcagctcaagaagcacgggctcgcggacgcgccggagggctcctggcggcgtgcggtcatcgagaagccgttcggccacgacctggccagcgcgcgtgagctgaacgcgatcgtgcacgaggtgttcgacccggaccaggtgttccgcatcgaccactacctgggtaaggagaccgtccagaacatcctggcgctccgcttcgccaaccagatgtacgagccggtctggaaccggtcgtacgtcgaccacgtacagatcaccatggccgaggacatcggcatcggcggccgtgcggggtactacgacggcatcggttcggcccgtgacgtcatccagaaccacctcctccagctgatggcgctgaccgccatggaggagccggccgccttcgacgccgagtcgctgctcgccgagaagctgaaggtcctcaagtccgtgaagctgccggggaacctgggcgagcacaccgtgcgcggtcagtacacggcgagctggcagggcggcgagcgggtgcgcggctacctccaggaggacggcatcgaccccaggtcgacgacggacacctacgcggccgtgaagctggaggtcgacaaccgccgctgggcgggcgtccccttctatctgcgcaccggcaagcgtctgggccgccgggtgaccgagatcgcggtggtcttccagcgcgcgccccactcccccttcgactcgaccgccaccgaggagttgggcgccaacgcgatcgtcgtccgtgtccagcccgacgagggcatgaccgtgcgcttcggttcgaaggtgccgggtacgtcgatggagatccgggacgtctcgatggacttcgcgtacggcgagtcgttcaccgagtccagcccggaggcgtacgaacggctgatcctggatgtcctgctcggcgacgccaatctcttcccccgccatcaggaggtggaagagtcctggaagatcctcgacccgatcgaggggtactgggacacgcacggcaagcccgcgcagtacccctcgggatcctggggtcccgaggaagccgacgagatgctcgcacgagacggacggagctggcgcaggccatga

SEQ ID NO: 148 - protein, 548 aa, Streptomyces avermitilis
MSKTPSTGTPGTEKPVTGTPATETPVTEAPVTEAPVTEASAVDWANPLRDPRDRRLPRIAGPSGLVIFGVTGDLSRKKLMPAIYDLANRGLLPPGFSLLGFARRDWEDQDFAQVVHDSVREHARTEFREEVWQQLAEGMRFIPGDFDDDMAFKQLRASVDELDASRGTSGNYAFYLSVPPKFFPKVVQQLKKHGLADAPEGSWRRAVIEKPFGHDLASARELNAIVHEVFDPDQVFRIDHYLGKETVQNILALRFANQMYEPVWNRSYVDHVQITMAEDIGIGGRAGYYDGIGSARDVIQNHLLQLMALTAMEEPAAFDAESLLAEKLKVLKSVKLPGNLGEHTVRGQYTASWQGGERVRGYLQEDGIDPRSTTDTYAAVKLEVDNRRWAGVPFYLRTGKRLGRRVTEIAVVFQRAPHSPFDSTATEELGANAIVVRVQPDEGMTVRFGSKVPGTSMEIRDVSMDFAYGESFTESSPEAYERLILDVLLGDANLFPRHQEVEESWKILDPIEGYWDTHGKPAQYPSGSWGPEEADEMLARDGRSWRRP

SEQ ID NO: 149 - DNA, 1491 bp, Nitrosomonas europaea
  CDS (1)..(1491)
atgaatgatgcaaaaatgagccagactgaaaagctgccctgcctgtttgtcatttttggtgcaactggagatctcgcctcaaacaagttgctgcccgcgttatttgagttggaaaatgctggccgcctggcagataatttttccatcgttgctttctcgcgccgcgagtggacaactgacgattggctcgaacatctgcgtgaaatactgaagaataggattgatcaatcttttccggaaggagtgctggagcgtttttttgcacgtttccgttatcagcagggagatctcaacgatatcgaatcctatcgtgtgttagctgccggtctggcgcccggatcggcttgttctcgtacggtattttatcttgcgatcaggcctgctgatttcgttgcggtgatcaggaatctcaaagctgctggcctcaatgagccgcgaggaatgaaccgtgtagtgattgaaaaaccgtttggagaggatcttgaatcggcacaggtactgaatcgcttattgcatcagcattttgatgaagagcagatttatcgtatcgatcatttccttggtaaggaaaccgtacagaatctgcttgttttccggtttgccaatacgttgatcgagccactgtggaatcgtaattttattgatcatgtacaaattacggtggcggaatcgggtggtattgaaaaacgtgcagggtattatgatcgtgctggtgcgttgcgtgatatgttgcagaatcatttgatgcaattattgaccgtagttgccatggaaccgccacctgctcttgaggcagatgctttacgtgacgaaaaggtcaaagtactacgttcgattcgtcccattgccaagcgcgcgatacatgcccatgctgtgcgcgctcaatatactcacggtaatatcgatgggcaggtggtggcaggttatcagcaggaagataatgttgaacgggattcgattaccgaaacttttgtggcagccaagttctacattgataattggcgctggcggggagtgccgttttatctgcgtacaggtaagcgtatgccgaaacagaattcgatgatcgcaattcgtttcaagcatcctccccagcaacttttccgtgaaacaccattggaatggattgcaccaaactgggtgttgctttcgattcagcctgaagaatcgatgcacatggaaattcatgttaaacaacccggtctcgatatgaatacccgggtgatgcagatgaacgcaagttttctcaaaaccgatgaacaggcgctggatgcttatgaagcgctactgctcgacgtcattgaaggcgatcgctcacttttcattcgttttgatgaagttgaatgggcgtggcaagtgattgatcctattctgaaacattgggtggtagagcgcgaatatatcccgacttaccctgctggcagttgggggccggcagaggctaatcgcttgtttgacaacgatgatcagacctggcgcaacgagctttag

SEQ ID NO: 150 - protein, 496 aa, Nitrosomonas europaea
MNDAKMSQTEKLPCLFVIFGATGDLASNKLLPALFELENAGRLADNFSIVAFSRREWTTDDWLEHLREILKNRIDQSFPEGVLERFFARFRYQQGDLNDIESYRVLAAGLAPGSACSRTVFYLAIRPADFVAVIRNLKAAGLNEPRGMNRVVIEKPFGEDLESAQVLNRLLHQHFDEEQIYRIDHFLGKETVQNLLVFRFANTLIEPLWNRNFIDHVQITVAESGGIEKRAGYYDRAGALRDMLQNHLMQLLTVVAMEPPPALEADALRDEKVKVLRSIRPIAKRAIHAHAVRAQYTHGNIDGQVVAGYQQEDNVERDSITETFVAAKFYIDNWRWRGVPFYLRTGKRMPKQNSMIAIRFKHPPQQLFRETPLEWIAPNWVLLSIQPEESMHMEIHVKQPGLDMNTRVMQMNASFLKTDEQALDAYEALLLDVIEGDRSLFIRFDEVEWAWQVIDPILKHWVVEREYIPTYPAGSWGPAEANRLFDNDDQTWRNEL

SEQ ID NO: 151 - DNA, 1524 bp, Enterococcus faecalis
  CDS (1)..(1524)
atgaatgaaaaagtagcattatttactattttcggggggacaggtgatcttgccaaacgtaaattgtatccttccctgttccgcttatataaaaaaggattattagctgagcgttttgcggtgattggtaccgcacgtcgggaatggacagacgaatactatcgtgaaatcgtccgtgaaaccattcaagacttaaatcccacggccgaagaggcaactgaattttctagtcatttctattaccaatcacataatgtgaatgatacggaacattataataccttaaaagaattatctgatcgcctaaatgaacaataccacttagaaggcaatcatgtttactatttagctatggcccctcaattctttggaaccattgttaatcacttgaaatcacaacatattatttcggaagaaggctttgatcgtctaattatcgaaaagccatttggttctgattatgaatctgcctacgaattaaatgaagaaattcgtgctgcatttcctgaacaagatattttccgaattgaccattacttaggcaaagaaatgatccaaaatatttcagccattcgttttgccaataatatttttgaatcacaatggaacaatcgttacattgataatgtccaaatcaccttcgctgaaagcttaggtgtcgaggatcgtggcggctattatgaccacagtggcgcactaaaagatatggttcaaaatcatattttacaagtcgttgcattgctttctatggagcctcctgttgccttttctgaaaaagaaattcggactgaaaaagtaaaagctttacgtgccatccgcctttattctgaagaagaagcccttcaaaatttcgtgcgtggacaatacggcgaaggtcagctagctgatcaaacatttgcagcctatcgtgatgaaccaaatgtggcagaaacttcatccactgaaacttttgttgctggtaaatttttaattgataatttccgttggtctggcgtccctttctatgttcgcacaggtaaacgattaactgaaaaaggcacacgcattaacatcgtctttaaacaagtacctattaatgtcttcaaagatgatacgtgtgaagaatgcgataaaaccgatttaccaccgaatgttttaactatctatatccaaccaactgaaggattttcattaaccttaaatggaaaagaaatcggtcaagggttcaatacaactccagtgaaacttgatttccgtcaaagtgctgaaatgactgaaaatagtccagaagcatacgaaaaacttctattagactgcctaaatggcgatagtacaaacttctctcattgggacgaagttgcccaatcttggcgcattgttgacattattcgacatgcttgggataaaacagacgtttctttccctaattatgccgctggcacaatgggcccgcaagctgccttcgacttattagaaaaagatggctttacttgggaatggcaaccagataactggtaccgtgaccgcggtcaacttgatcaatga

SEQ ID NO: 152 - protein, 507 aa, Enterococcus faecalis
MNEKVALFTIFGGTGDLAKRKLYPSLFRLYKKGLLAERFAVIGTARREWTDEYYREIVRETIQDLNPTAEEATEFSSHFYYQSHNVNDTEHYNTLKELSDRLNEQYHLEGNHVYYLAMAPQFFGTIVNHLKSQHIISEEGFDRLIIEKPFGSDYESAYELNEEIRAAFPEQDIFRIDHYLGKEMIQNISAIRFANNIFESQWNNRYIDNVQITFAESLGVEDRGGYYDHSGALKDMVQNHILQVVALLSMEPPVAFSEKEIRTEKVKALRAIRLYSEEEALQNFVRGQYGEGQLADQTFAAYRDEPNVAETSSTETFVAGKFLIDNFRWSGVPFYVRTGKRLTEKGTRINIVFKQVPINVFKDDTCEECDKTDLPPNVLTIYIQPTEGFSLTLNGKEIGQGFNTTPVKLDFRQSAEMTENSPEAYEKLLLDCLNGDSTNFSHWDEVAQSWRIVDIIRHAWDKTDVSFPNYAAGTMGPQAAFDLLEKDGFTWEWQPDNWYRDRGQLDQ

SEQ ID NO: 153 - DNA, 1464 bp, Tropheryma whipplei
  CDS (1)..(1464)
atgccaaaggtgaattgcgcaacacagcagattgccctgcctggggcgcttgctatattcggggcaacgggtgacctgagctccaaaaaactattgccagcggtgtacgacttgtttcataactctcttctatcaaatgggttcgttttaattgctctgaatagagacttctcggcgcaagattttatctgtcacttccgccattgcgttaagtctttctctaggacgggatggtcagagtctgtttttcttgatctccaaaaaagggtacatcatgtaagtggcgacttttccgaccccgagacatatattgagctctctgagaaattagaaaccaccaaagaggaaactgggggtaattgtgttttttatctctcagttccgccaaatgtatttactcccatcatgaaaaacttgtctgctagtgggctgtctagaggatgtttgcataaaattgctgttgaaaaaccctttggtaatgaccttaaaagtgcaatacagcttaattcagtgcttaggtcagctttccctgagcgtgctatctttcgggttgatcactatcttggtaaagagaccattcaaaatattcttacttttcgttttggaaaccaaatctttgaccctatttggaataggaaacatgttgatcatgtgcagattacgatgtctgaagatataggggttgagggtcgcagtaagtactatgacggaatcggtgctgcacgtgatgtattacaaaatcatcttttgcagcttatggctctaattacgatggagagaccctcgaatttgaataacgcgagtgatataaggcacgagaagcagagagttttggaatgtgtgagtcttccgaaaaatatagctcaaaatgctgttcgtggccaatactcatccggctatctacgggatgagagggttgtatcttttttgcaagaagatggggttaatccatcttcaagaactgaaacattcgcggcgataaagctaaatgccgataatgaacgttggtatggtgtacctttctacgttagaactgggaaacggatggcaaaacgtagtgcatatataagtcttgtattcaagccaactgatatgagtattttgcaaaatgtgattgttataaggttgcaaccagacgagggtgtgtctatttggtttgcgtcgaaagtgcccggttatcgttctgatattcgacaggtgaattttgatttttcgtataaaagctcatttactgaatcaagtccagaggcttatgaacgcttaattctggatgcaatgaggggtgaggcctccttgtttccgcagcaaagagaagtggagttgtgttggggcataatagacccccttgaggaggtttgggaaaacgacaataccctgataccccaatacactccaggaagttgggggccagatacttcaaacgaccttttgctcagaacgtccaggcactggagaaattactga

SEQ ID NO: 154 - protein, 487 aa, Tropheryma whipplei
MPKVNCATQQIALPGALAIFGATGDLSSKKLLPAVYDLFHNSLLSNGFVLIALNRDFSAQDFICHFRHCVKSFSRTGWSESVFLDLQKRVHHVSGDFSDPETYIELSEKLETTKEETGGNCVFYLSVPPNVFTPIMKNLSASGLSRGCLHKIAVEKPFGNDLKSAIQLNSVLRSAFPERAIFRVDHYLGKETIQNILTFRFGNQIFDPIWNRKHVDHVQITMSEDIGVEGRSKYYDGIGAARDVLQNHLLQLMALITMERPSNLNNASDIRHEKQRVLECVSLPKNIAQNAVRGQYSSGYLRDERVVSFLQEDGVNPSSRTETFAAIKLNADNERWYGVPFYVRTGKRMAKRSAYISLVFKPTDMSILQNVIVIRLQPDEGVSIWFASKVPGYRSDIRQVNFDFSYKSSFTESSPEAYERLILDAMRGEASLFPQQREVELCWGIIDPLEEVWENDNTLIPQYTPGSWGPDTSNDLLLRTSRHWRNY

SEQ ID NO: 155 - DNA, 2145 bp, Leishmania mexicana
  CDS (298)..(1986)
aggcggagcgcgagcgcggcatcacgatcgacattgcgctgtggaagttcgagtcgcccaagtcggtgttcacgatcatcgatgcgcccggccaccgcgacttcatcaagaacatgatctaaaataaagcgaagaacaccaaggagaaatcgaaaaggacaggcgactcgtcgagaaagagaatttggtgtccttattgaacccccttcctattacttgtttagagctctcgatcgcattttattttgcctttggctaccatatagtgatcagtggcaggtacatcaattaagcaccatgtcggaagagcagtttgctgcttctcaagaggcctatgtggccgacgtcgacagcattctggacgtgctccgcgcgcaagtgctggagcggaagccggataacgttctccagtttatctccaagtcggcgcttagtctacagaaggacagcagctcggaatcctgcgatctcatcagctgtaaggtgaaggatgagcagaagagtcgttcgttgaccatcatcgtgttcggtgccagcggagatctggccaagaagaagacatttcctgccctcttcagcctgtactgcggtggccttctccccccggatgtcaatattatcggctatgcgcgcaccaaggtggacgatgccgagaagtggaagcatgagacgctcatgaagcatttttcgaacttgtcggagcgtgaatgccacgccgaggatttcttgaaacatatcagctatttttgtggatcatacgacaaggtggaagacttcaagcgtcttgacattatgattcgcgaaaaggagaatgcttttaagggccctgaaaagggtggaaaccgtctcttctacctcgctcttccgccatccgttttcgcgactgtctgtgaaagcatttacaagggcgtgatgccgcaagaagtagggggatgggttcgggtgatcatcgagaagccctttggccgcgatactgagagctccgcggagctgtcacgagcgctggagccgttcttcaacgagtcacagatctaccgcattgatcactacctcgggaaggagatggtgcagaacatcattacaacacgcttcgccaaccgtattttcagcgctgtgtggaactcgagcaacatcgcgtgcgtgcagatcaccttcaaggagaccataggcactgagggccgtggtggctacttcgacagcatcggcattattcgcgacgtcatgcaaaaccatctcacacaaattcttgcattgctggcgatggagaagccgcggacgcttgacgccgagtgtatccgtgacgagaaagtgtcagtactgaaacacattgaaccagtaaccaaggagaattgtgttctggggcagtacactgcctccgccgatggctccattcctggctacctggaagacgagaccgtacccaagggcagcacttgccctacatttgctgtgatgcggcttaacatcaacaacgaccgctgggccggcgttccttttattctcaaggccggcaaggctgtggagcagaagtacgtagcaattcgcattcagttcaaggacgaggtacacccctacggtgaggcgacacagcgcaacgagctcgtcatccgtgcccagccgtccgaggccatgtatgtcaagatcaccacaaaggttcctggcctgagcggtgacttgcgacaaacgcaccagacagagctggacctcacatatcacacccggtacgatgtgcgccttccagatgcctacgaaagccttctcaatgacgcacttctggggagctcgacaaattttgtgcgcaaggacgagcttgacgtggcatggcgcatcttcacaccgcttctgcaccagatcgaccgtggagagatcaaacccattcagtaccaggccggtacgcgtgggcccaaggaagcggatgagttcatcatcagcaacggctttaagcaccagaaaggctatcactggcttcccttcaacaaactgtgaaaggaggcgaatcagtctgttttacagtcgcctgctgatgacagcgagagacgcagagcgtctcacgctgatgagtgtcatatgcggtcaggaatcactgatggcgctctgccatatgcacacacgggcaacacacgagagtgaagacagacatcacgc

SEQ ID NO: 156 - protein, 562 aa, Leishmania mexicana
MSEEQFAASQEAYVADVDSILDVLRAQVLERKPDNVLQFISKSALSLQKDSSSESCDLISCKVKDEQKSRSLTIIVFGASGDLAKKKTFPALFSLYCGGLLPPDVNIIGYARTKVDDAEKWKHETLMKHFSNLSERECHAEDFLKHISYFCGSYDKVEDFKRLDIMIREKENAFKGPEKGGNRLFYLALPPSVFATVCESIYKGVMPQEVGGWVRVIIEKPFGRDTESSAELSRALEPFFNESQIYRIDHYLGKEMVQNIITTRFANRIFSAVWNSSNIACVQITFKETIGTEGRGGYFDSIGIIRDVMQNHLTQILALLAMEKPRTLDAECIRDEKVSVLKHIEPVTKENCVLGQYTASADGSIPGYLEDETVPKGSTCPTFAVMRLNINNDRWAGVPFILKAGKAVEQKYVAIRIQFKDEVHPYGEATQRNELVIRAQPSEAMYVKITTKVPGLSGDLRQTHQTELDLTYHTRYDVRLPDAYESLLNDALLGSSTNFVRKDELDVAWRIFTPLLHQIDRGEIKPIQYQAGTRGPKEADEFIISNGFKHQKGYHWLPFNKL

SEQ ID NO: 157 - DNA, 1494 bp, Dictyostelium discoideum
  CDS (1)..(1494)
atgacatcaacaccagactctcgttcagttttaacagtaattattttaggtgcatcaggtgatcttgcaaagaaaaagacctatccagcactctttggtttatatcttagagatttgttaccaagcaacacaatcatttatggttatgctagatcacatattgaaattggtgatttcaaagctagaatctcaaaaggattaaaaggtgatgaagaaaagaaaaaacaatttttaaatttattacattatcattcaggtaaatatgatgaaaaagcatcctatgatgaatttgaaaaattaattttagcagaagaaaagaaacaacaaggtgttgataaattcaatcgtttattctatatggcaattccaccatcaattttcattgaagttagtattggtattcatggttcattgatctcaaagaatggttggtcaagagttatcgttgagaaaccatttggacgtgatttagcatcctcaagagagttggttagtgaattgggtaaacttttcaaagagaaagatttattccgtatcgatcattatttgggtaaagagatggtacaaaatttaatggtattaagattcgccaatgcagtattcgagccattatggtcaaaatcacatatctcttcaatcaccatcacattcaaagaagacattggtaccgagggtagaggtggttatttcgatcaatttggtatcattagagatgtaatgcaaaatcatttgcttcaagtactctctttggttgcaatggagccaccagtgtcattgaatgccgatgatatcaccaatgaaaaggttaaattacttcgttgtattcaaccaattaaaatgagtgaagttgtactcggtcaatatacttccgatcctgaaggtaaaattccagcctatttagatgatgaaggtgttccaaaggattcaaccactccaacctatgctgccgctgttttccatatcaataatccaagatggagaggtatgccattcatcttaaaatgtggtaaagctttagatgaaagaaaaactgaagttagaattcaattcaaacgtccagataactttttattctctgatgatgatatctcaagaaatgaattagttatgagaattcaaccaggtgaagctgtttacttaaaattattatcaaagaaaccaggtttagaaaataaaattgaacaaactgaattagatttatcatatcgtcatagatttgaaaatcttgatttaccagatgcatatgaacgtttaattcttgattcaattaaaggtgatcataaccttttcgtcagagatgatgaattagatgttgcatggcaaatatttacaccattactcgatcaaattgaaaaagaaaagattaaacctgaaccatattcctttggttcacgtggtccaaaatctgctgatgaattatcaaagaaatttggtttcattagatccttaggttataattggccaggtaattctccacaaggtagtaaaaaataa

SEQ ID NO: 158 - protein, 497 aa, Dictyostelium discoideum
MTSTPDSRSVLTVIILGASGDLAKKKTYPALFGLYLRDLLPSNTIIYGYARSHIEIGDFKARISKGLKGDEEKKKQFLNLLHYHSGKYDEKASYDEFEKLILAEEKKQQGVDKFNRLFYMAIPPSIFIEVSIGIHGSLISKNGWSRVIVEKPFGRDLASSRELVSELGKLFKEKDLFRIDHYLGKEMVQNLMVLRFANAVFEPLWSKSHISSITITFKEDIGTEGRGGYFDQFGIIRDVMQNHLLQVLSLVAMEPPVSLNADDITNEKVKLLRCIQPIKMSEVVLGQYTSDPEGKIPAYLDDEGVPKDSTTPTYAAAVFHINNPRWRGMPFILKCGKALDERKTEVRIQFKRPDNFLFSDDDISRNELVMRIQPGEAVYLKLLSKKPGLENKIEQTELDLSYRHRFENLDLPDAYERLILDSIKGDHNLFVRDDELDVAWQIFTPLLDQIEKEKIKPEPYSFGSRGPKSADELSKKFGFIRSLGYNWPGNSPQGSKK

SEQ ID NO: 159 - DNA, 1503 bp, Xylella fastidiosa
  CDS (1)..(1503)
atgctgctcacgcaaacaaaaacacccccacaccaacaaacgttaacatccaaatccgagaccaggtccatgcacaacaccctcttattgtttggcgccaccggcgacctcgcccaacgctatctcttcccctccttactgcaactgtttactgatggcttattgccacaagacttccgcattcgtgctctggccttgtcaccccataacaccacacaattccgcgacatcctgcgcacgcgcttggaacaagcactacccatcgccaacaccgcgcacatccaagccctactacaacgtgtcgactacctttccgtagacttgaacgacccaacatcaatcgccgaagcagtccgagatctgacggaacatccctgcatcagctacttggcaatcccaccaggcctgtataccaacaccgccctaggattggcacaaggaggggcactgcagacaccacaccgattgatgctggaaaaaccgatcggacgcgactcaataaacgcacgcgaaatcctaaacaccatcggcacactgattgacgaagatcgcatcttccgcgtagaccactatctaggcaaagcagcagtgcagaacctcgtcgcactgcggttcggaaacaccctgctagaagcggtatggaaccgaaaccacattgagtccgtacacatcctcatcgccgaaaccgaaggcgtcgatggccgcaatgcttactacgcacgtgctggcgcactacgtgacatgatgcaaagccacatcctgcaactcctatgcctggtcgctatggaacccccggtctctatggaagccgaccgcatacgcgacgaaaaagtcaaagtcctgcgcgcactacgcccactgaacgcccaaaacgccgcaatgcacagcgtgcgcggacgctacagcgcgggcaccattaacagccaaccagtgccagcctatcaaccaccagaaggcagcaatgtagagacctttgtcggtgtcaccgcatacatcgacaactggcgctgggcgggcgtaccgttccatctatgcacaggaaaacgcttggccgaacgctcaacccaaatcgtcgtcaccctcaaacccgtcacacactggctatttgaacgtccaaaccggaacaatgcagcaccaaaccgcctgtgcttcaaactacagccccaggaaaatatcgaactaaacctgatgagcagcctggccggccccgaatggggaaccctagaactgcaaccgctggaattggagttatccgtcccaaccgggaaacatcgccacatcgcctatgagcgccttttcctcgacgcattcaacggcaaccctgcgctatttgtacgtcacgacgaagtcacagaagcctgggcttggatcgacagcatcagcaatgcctgggaactgtccgacttaccactgcaaccctaccccgccggcggctggggcccacctcaagcccaccaatttctgccgccattggggattgatggccatggaaacaacgcatga

SEQ ID NO: 160 - protein, 500 aa, Xylella fastidiosa
MLLTQTKTPPHQQTLTSKSETRSMHNTLLLFGATGDLAQRYLFPSLLQLFTDGLLPQDFRIRALALSPHNTTQFRDILRTRLEQALPIANTAHIQALLQRVDYLSVDLNDPTSIAEAVRDLTEHPCISYLAIPPGLYTNTALGLAQGGALQTPHRLMLEKPIGRDSINAREILNTIGTLIDEDRIFRVDHYLGKAAVQNLVALRFGNTLLEAVWNRNHIESVHILIAETEGVDGRNAYYARAGALRDMMQSHILQLLCLVAMEPPVSMEADRIRDEKVKVLRALRPLNAQNAAMHSVRGRYSAGTINSQPVPAYQPPEGSNVETFVGVTAYIDNWRWAGVPFHLCTGKRLAERSTQIVVTLKPVTHWLFERPNRNNAAPNRLCFKLQPQENIELNLMSSLAGPEWGTLELQPLELELSVPTGKHRHIAYERLFLDAFNGNPALFVRHDEVTEAWAWIDSISNAWELSDLPLQPYPAGGWGPPQAHQFLPPLGIDGHGNNA

SEQ ID NO: 161 - DNA, 1506 bp, Vibrio parahaemolyticus
  CDS (1)..(1506)
atgatggtaataccagaaaacagcagcatcgttatttttggtgcttcaggtgaccttacatatcgtaagctcattcctgctttataccacctttatgcgaacaagcagcttccagagagttttgccattcttggcgtaagtcgtactgaatacagtgacgagtcctaccgcgagaagctgaaaaaatcgcttcaagaaatggaaaaaaccgagccagaaacgcttgatgcatttatcaaccatctgcattaccaagcaattaacacttctgacacgcaagattacagcaagctggcaacacgtttagaccaacttgccgacgaatatcaattcgaacaacgtaatacgcttttctacctagctacacctccaagcctatacagtgtgatccctgcaagccttgcagcacatggtttgaacaatgaggaagatggctggaaacgtctgatcatcgagaaaccgttcggttacgaccttgagtcagcacgcacgttggataaagaaattcacgagcacttccaagaacatcaaatctaccgtatagaccattatttaggtaaagagacggttcaaaacctgcttgttttccgtttctctaacgcgatgtttgaaccgctttggaaccgtaacttcattgattacgtggaaatcacaggcgctgaattccttggcgtagaagagcgtggtggttactacgacaactctggcgctgtgcgcgatatgttccaaaaccacttgctacaagtattggcaatggtcggtatggaaccaccagcacaaatcaacgcagattcaatgcgtgatgaagtggtgaaagtgcttcaatgcctaaaaccactggatgaaacagcattacgtaacgatcttgtccttggtcagtacactgcatcagacgtacgcggccaacaccttccgggttaccgtgaagaaaacggcgtagcggacgattctcgtactgagacgtacattggtctaaaagcttacatcaacaactggcgttggaatggtgtacctttctatgtacgtacaggtaagcgtcttccgactcgcgttactgaagtggttattcactttaaacaaacaccgcacccagtgtttggccaaaatgcgccagaaaacaaactgatcattcgtattcagccagacgaaggcattcagatgagctttggtttgaaagaaccaggtgcaggctttaatgcgaaggaagtgaaaatgaacttccactacgcagacctgcaagagactcaaatgctaactgcgtacgagcgtcttctacttgatgctctaaatggcgatgcgacgctatttgcacgtagcgatgcagttgaagcatgttggcagtacgttcagccaattttagacttcaaacaagatcctcaatcactcttcggatacgcatgtggtacatggggtcctaaagagtctgatgacttgcttcagcgtgacaaccgcgcttggcgtttcccatgtaaaaacctaacagatacggactactgtgaactatga

SEQ ID NO: 162 - protein, 501 aa, Vibrio parahaemolyticus
MMVIPENSSIVIFGASGDLTYRKLIPALYHLYANKQLPESFAILGVSRTEYSDESYREKLKKSLQEMEKTEPETLDAFINHLHYQAINTSDTQDYSKLATRLDQLADEYQFEQRNTLFYLATPPSLYSVIPASLAAHGLNNEEDGWKRLIIEKPFGYDLESARTLDKEIHEHFQEHQIYRIDHYLGKETVQNLLVFRFSNAMFEPLWNRNFIDYVEITGAEFLGVEERGGYYDNSGAVRDMFQNHLLQVLAMVGMEPPAQINADSMRDEVVKVLQCLKPLDETALRNDLVLGQYTASDVRGQHLPGYREENGVADDSRTETYIGLKAYINNWRWNGVPFYVRTGKRLPTRVTEVVIHFKQTPHPVFGQNAPENKLIIRIQPDEGIQMSFGLKEPGAGFNAKEVKMNFHYADLQETQMLTAYERLLLDALNGDATLFARSDAVEACWQYVQPILDFKQDPQSLFGYACGTWGPKESDDLLQRDNRAWRFPCKNLTDTDYCEL

SEQ ID NO: 163 - DNA, 1533 bp, Pseudomonas syringae
  CDS (1)..(1533)
atgggtctgtcgcgcggcagtgccgagcaaaaagccgaagttgcgcccccaaccaccctgtttctgttcggtgcacatggtgacctggtcaagcgtctgctgatgccggcgctttacaacctgtcgcgcgacggtctggtggatgaagggctgcacatcgtcggcgtcgatcacaacgcgatcagcgatgcggacttcgccaaaaaactcgaaaatttcattcgcgacgaggccgccggcaaaattgccggcggtggcaaggaccctctcgatcctgcgttgtggggcacgctggccgagcgtatcagctatgtgcagggtgactttctggatgattcgacctatcaggacatcgccagcaagattgagagcaccggtgcgaaaaacgcggtgttttatctggccaccgcgccgcggttcttcagcgaagtggcccagcgcctggggtcgtccggtttgctgcaggaaaccgatgacgggttccgccgggtaatcatcgaaaagccgttcggctccgatctggccagtgcagtggcgctcaatggctgcctgctcaaggtcatgagcgaaaaacagatctaccggatcgaccattacctgggcaaggagacggtgcagaacattctggtcagccgtttctccaatggcctgttcgagtcgttctggaacaaccactacatcgaccacgtgcagatcaccgccgcggaaaccgtgggtgtcgagacccgtggcagtttttacgagcacaccggtgcactgcgcgacatggtgcccaatcacctgttccagttgctggcgatggtcgcgatggagccccccgcggccttcggtgccgacgcggtccgtggcgaaaaagccaaggtggtgggcgcgatcaggccgtggaacaaagaggaagcactggccaattcggtacgcggtcagtatgcgcagggcacgatgggcgacaaggaggttgtcggttatcgccaggaagatcgggtcgagcctgacagtacgacggaaacctatgtggcgctcaaggtcatggtcgacaactggcgctgggtgggcgtgcctttttatctgcgcacaggcaagcgcatgagtgcccgcagcactgaaatcgccatctgcttcaaacctgcgccctatgcgcaatttcgtgacaccgaagtcgatcgtttgaagcccaactacctgcgcatccagattcagcccaacgaaggcatgtggttcgatctgttcgccaaacggcccggcccgacgctggacatggaggacatcgcgctgggttttgcctataaggacttcttcgagatgcagccttcgaccggctacgaaacccttatatacgactgtctgaccggcgaccagaccctgtttcagcgtgccgacaacatcgaaaacggctggcgtgctctgcagccgtttcttgatgcctgggccagccagcctgaagttcagccgtatgaggctggcaagaacggacctgatgcgggtgacgagttgctgagccgtgatggtcgcgagtggagagatctgaatgtctga

SEQ ID NO: 164 - protein, 510 aa, Pseudomonas syringae
MGLSRGSAEQKAEVAPPTTLFLFGAHGDLVKRLLMPALYNLSRDGLVDEGLHIVGVDHNAISDADFAKKLENFIRDEAAGKIAGGGKDPLDPALWGTLAERISYVQGDFLDDSTYQDIASKIESTGAKNAVFYLATAPRFFSEVAQRLGSSGLLQETDDGFRRVIIEKPFGSDLASAVALNGCLLKVMSEKQIYRIDHYLGKETVQNILVSRFSNGLFESFWNNHYIDHVQITAAETVGVETRGSFYEHTGALRDMVPNHLFQLLAMVAMEPPAAFGADAVRGEKAKVVGAIRPWNKEEALANSVRGQYAQGTMGDKEVVGYRQEDRVEPDSTTETYVALKVMVDNWRWVGVPFYLRTGKRMSARSTEIAICFKPAPYAQFRDTEVDRLKPNYLRIQIQPNEGMWFDLFAKRPGPTLDMEDIALGFAYKDFFEMQPSTGYETLIYDCLTGDQTLFQRADNIENGWRALQPFLDAWASQPEVQPYEAGKNGPDAGDELLSRDGREWRDLNV

SEQ ID NO: 165 - DNA, 1470 bp, Pseudomonas syringae
  CDS (1)..(1470)
atgcccttgattacggttgaaccgtgcacatttgccctgtttggtgccctgggggacctggcggtacgcaagctgttcccggctctttatcagcttgatcgcgctggactgctgcatgaagacacaaaaattcttgccctggcgcgtgaaccaggcgacgaacagtcgcatctggcctacatcgaaaaatccatgcgccgcttcattcccgaggcggagcttgaggccgacaacgcagcgcgcttcctggcgcgcctcagctacctgcatgtcgattttctcaaggccgaggactatgttgcgctggccgagcgcgttggcaatgccgagacgctgatagcctacttcgccacgccggcctcggtgtacggcgcgatctgcgagaacctcgcgtcggtgaacctggccgagcgcacacgcgccgtcctggaaaagcccatcggccatgacctggcctcgtcgcgacgggtcaacgacgccgttgcgcagttcttcccggaaaaccgcgtctaccgaatcgaccattacctgggcaaggacacggtccagaacctcattgccctgcggttcgccaacagcctgttcgagacccagtggaaccagaaccatatttcccacgtggaaatcacggttgccgagaaagtcggcattgagggccgctggggctacttcgatcaggccggccagctgcgcgacatgattcagaaccacctgctgcagttgctctgcctgatcgccatggacccgcccagcgacctgtcggccgacagtattcgtgacgagaaggtaaaagtgctcaaggcactggccccgttcacccccgagcgtctggccacccaggtggtgcgcggtcagtacaccgctggctacagcgaaggcaaggcagtgccgggttatctggaagaagagaactcaaacacccagagcgacaccgaaacctttgttgcgttgcgtgccgatatccgcaactggcgctggtcgggtacgccgttttatctgcgtaccggcaagcgcatgccgcagaaaatgtcgcagatcgtgatccacttcaaagagccgccgcactacatctttgcccctgagcagcgtttgcagatcagcaaccgcctgatcattcgtctgcagcctgacgaaggtatttccctgcaggtgatgaccaaggatcaggggctggacaaaggcatgcagctgcgcagcggccccttgcaactgaatttttccgacacctaccgcagcgctcgtgtccccgacgcttatgagcggttgttgctggaagtcatgcgtggcaatcagaacctgtttgtccgcaaagatgaaatcgagtacgcctggcaatggtgcgatcagctgattgccggctggaagaaggcgggcgatgcgcccaagccttacccggccggaacctgggggccaatgagctccattgccctgattactcgcgacgggagatcctggtatggcgatatgtga

SEQ ID NO: 166 - protein, 489 aa, Pseudomonas syringae
MPLITVEPCTFALFGALGDLAVRKLFPALYQLDRAGLLHEDTKILALAREPGDEQSHLAYIEKSMRRFIPEAELEADNAARFLARLSYLHVDFLKAEDYVALAERVGNAETLIAYFATPASVYGAICENLASVNLAERTRAVLEKPIGHDLASSRRVNDAVAQFFPENRVYRIDHYLGKDTVQNLIALRFANSLFETQWNQNHISHVEITVAEKVGIEGRWGYFDQAGQLRDMIQNHLLQLLCLIAMDPPSDLSADSIRDEKVKVLKALAPFTPERLATQVVRGQYTAGYSEGKAVPGYLEEENSNTQSDTETFVALRADIRNWRWSGTPFYLRTGKRMPQKMSQIVIHFKEPPHYIFAPEQRLQISNRLIIRLQPDEGISLQVMTKDQGLDKGMQLRSGPLQLNFSDTYRSARVPDAYERLLLEVMRGNQNLFVRKDEIEYAWQWCDQLIAGWKKAGDAPKPYPAGTWGPMSSIALITRDGRSWYGDM

SEQ ID NO: 167 - DNA, 1458 bp, Pseudomonas putida
  CDS (1)..(1458)
atggagagtggtggtttgactattccttgcgacattctggtcttcggcggcaccggtgatctggccctgcacaaattgcttccggcgctctaccacctgtttcgcgaggcccgtctgaaccctgccgtgcgggtcatcgcactggccaggcgcaacctgccacgcatcgactatctgaagctcgccgaacgccattgtcgggcgcagattgcccgcagcgacttcgacgaagaggtgtggcagcggttttccgcacgggtcgactacttcccgatggatgcttcacagagcgccgacttcggccgcctggcacgctacctgggcgaacccggtggactgacacgcatcttctacctggccaccgctcccaacctgttcgtgccgattgccaaccacctgcgcattgccggactggccgacaccgaagcgcgcatcgtgctggaaaaaccgatcggccattcgctggaatcggccactgccatcaatgaagcgattggcacggtgttcgaagaaagacaggtgttccgcatcgaccactacctgggcaaggaaaccgtgcagaacctgatggccctgcgttttgccaatgccctgctggagccggtgtggcgcaacaaccaggtcgaccatgtccagatcagcgtttgcgagacactgggcgtagaaaaccgcggtgcctactacgatcgcgccggggctattcgcgacatgctgcagaaccacctgctgcagctgctgtgcctggtggccatggagccacccgcgcaattcgaggcagaggcggtacgcgacgaaaaggtgaaaatcctgcgcgccctcaagccgatcaccggccaggatgtgcaggacaagacggtacgcggccaatatggggccgggcgtatcggcggccaggaagtgccggcctactactttgaaaaggacgtcgacaacgacagcgataccgaaactttcgtggccatcgaggcgcatatcgacaactggcgctgggcgggcgtgcctttctatctgcgcaccggcaaacgcatggcgcggcgcgcttcgcagatcgtcatccagttcaagccagtgcctcacgaactgttcagcggcggccaggtcaaccagttgctgatacagctgcaaccggacgaacgcatcagcctgcgcatgatgaccaagagcccaggcaagggcatgcgcctggaacccgtggacctggaccttaatctggcccaggtgttcagccagactcgccgctgggaagcctacgagcgtctgctgctggatgtgctcgaaggtgattcgacactgttcatgcgccgcgatgaagtggaagcagcctgggcttgggtagatccaatcatcaagggctgtgaagagcacttccaggcgccccgcccctacccggctggcagtttcgggcccgaacaagccaacagcctgctcgccaggcatggcaggcactggcatggctga

SEQ ID NO: 168 - protein, 485 aa, Pseudomonas putida
MESGGLTIPCDILVFGGTGDLALHKLLPALYHLFREARLNPAVRVIALARRNLPRIDYLKLAERHCRAQIARSDFDEEVWQRFSARVDYFPMDASQSADFGRLARYLGEPGGLTRIFYLATAPNLFVPIANHLRIAGLADTEARIVLEKPIGHSLESATAINEAIGTVFEERQVFRIDHYLGKETVQNLMALRFANALLEPVWRNNQVDHVQISVCETLGVENRGAYYDRAGAIRDMLQNHLLQLLCLVAMEPPAQFEAEAVRDEKVKILRALKPITGQDVQDKTVRGQYGAGRIGGQEVPAYYFEKDVDNDSDTETFVAIEAHIDNWRWAGVPFYLRTGKRMARRASQIVIQFKPVPHELFSGGQVNQLLIQLQPDERISLRMMTKSPGKGMRLEPVDLDLNLAQVFSQTRRWEAYERLLLDVLEGDSTLFMRRDEVEAAWAWVDPIIKGCEEHFQAPRPYPAGSFGPEQANSLLARHGRHWHG

SEQ ID NO: 169 - DNA, 1506 bp, Pseudomonas putida
  CDS (1)..(1506)
atgactaaacagacccttgcggccgcccccccttgtaccctgttcctgttcggcgccaatggcgacctggtcaagcgcctgctgatgcccgcgctgtacaacctcagccgtgacggtttgctggaccgtaacctgcgcatcgtcggcgttgaccataacccggccagcgccgaggatttcgccgcgcgcctgcacgcgttcatggtcgagcgtgacaaaggcggcgagggcagcgccaagtgcctggacgagaagctatgggcccgcctggccaagcgcctcgattaccagacgggcgactttctcgatccggccacctaccaggccctggccaggcgcatcgacaagacccgccacggcaatgccattttctatctggccacgtcgccgcgcttcttccccgaggtggcgcagcgcctggggcaggccggcttgctggacgagtctgccggcggctttcgccgggtggtggttgaaaaaccgttcggcaccgacctggccagcgccgaggcgctcaacgcctgcctgctgaaggtgatgggcgagcggcagatctaccgcatcgaccattacctgggcaaagagacggttcagaatattctggtcagccgcttttccaacggcttgttcgaatcgttctggaacaatcactacatcgaccacgtgcagatcaccgcagcggaaaccgtcggtgtcgagacccgtggtgcgttctatgacagcaccggcgccctgcgcgacatggtgcccaaccacctgttccagttgctggcgatggtggccatggagccgccggccgcgttcggcgccgatgcggtgcgcggtgaaaaggccaaggtggtcggcgctattcgcccatggtcggcaaaaatggcccagaagaattccgtacgaggccagtacagagccggcaagcaggggcgcaagccgttgccaggctaccggcaggagcccaacgtcgcgccggatagccagaccgagacctacgtggcgctgaaggtgatgatcgacaactggcgctgggccggcgtgccgttctacctgcgcaccggcaagcgcatgagcgtgcgtgacaccgagattgccatctgcttcaagcccgcaccgtatgcgcagtttcgcgagtcggagctggaacggcccaaacccaactacctgaaaatccagatccagcccaatgaaggcatgtggttcgacctgcaagccaaacggcccgggccagagctggtgatggagaatgtcgagttgggttttgcctacaaggacttcttcaagatgaccccggccactggctacgagacgctgatctatgactgcctgaccggtgaccagaccctgttccagcgggctgacaacatcgaaaacggttggcgagcggtgcagccgtttctcgatgcctgggcccagggcggcgaagtgcatgagtactcggctggcgaagatgggcctgaggccggcaatgaattgctgacccgcgacaagcgggagtggcaccggttggggtga

SEQ ID NO: 170 - protein, 501 aa, Pseudomonas putida
MTKQTLAAAPPCTLFLFGANGDLVKRLLMPALYNLSRDGLLDRNLRIVGVDHNPASAEDFAARLHAFMVERDKGGEGSAKCLDEKLWARLAKRLDYQTGDFLDPATYQALARRIDKTRHGNAIFYLATSPRFFPEVAQRLGQAGLLDESAGGFRRVVVEKPFGTDLASAEALNACLLKVMGERQIYRIDHYLGKETVQNILVSRFSNGLFESFWNNHYIDHVQITAAETVGVETRGAFYDSTGALRDMVPNHLFQLLAMVAMEPPAAFGADAVRGEKAKVVGAIRPWSAKMAQKNSVRGQYRAGKQGRKPLPGYRQEPNVAPDSQTETYVALKVMIDNWRWAGVPFYLRTGKRMSVRDTEIAICFKPAPYAQFRESELERPKPNYLKIQIQPNEGMWFDLQAKRPGPELVMENVELGFAYKDFFKMTPATGYETLIYDCLTGDQTLFQRADNIENGWRAVQPFLDAWAQGGEVHEYSAGEDGPEAGNELLTRDKREWHRLG

SEQ ID NO: 171 - DNA, 1470 bp, Pseudomonas putida
  CDS (1)..(1470)
atggccgcaatcagtgtcgaaccttgcacctttgccctgtttggcgccctcggcgacctggcattgcgcaagctgtttcctgcgctctaccagctcgaccgggccaacctgttgcacccggacacccgcctgctggccctcgcccgtgaggtcggcagtgcgcaggagcacctggacagcatcgaagcccacctgcgccggcacgtgcccgaggcagatatcgagcctgctgcgctggggcgcttccttgcccgcctgaattaccagcacctggacttccttcagcccgagggctatcaggccctggccgagcagctgccgggcgagctgccgctgatcgcctacttcgccacggcggcggcggtgtatggggccatctgcgaaaacctcgacaaggtcgggctggctgcgcgcacccgggtagtgctcgagaaacctattggccacgacctggagtcgtcgcgccgggtcaacgacgccgtggcgcggttcttccctgaaagccgggtttaccgcattgaccattacctgggcaaagagacggtgcagaacctgattgccctgcgcttcgccaatagcctgttcgaaacccagtggaaccagaattccatctcccatgtggagattaccgtcgcggaaaaggtcggtatcgagggccgttggggttatttcgacaaggccggccaactgcgcgacatgatccagaatcacctgctgcagttgctgtgcctgatcgccatggacccgcccagcgaactgtccgccgatgccatccgcgacgagaaggtgaaagtgctcaaagccctggcaccgatcactggcgacggcctgagcaccagcgtggtgcgcggccagtacattgccggctacagcgaaggcaagccggtgccgggttacctggaagaagacaacgccaacgcccagagcgacaccgaaaccttcgtcgccctgcgcgccgacatccgtaactggcgctggtcgggcgtgccgttctacctgcgaaccggcaagcgcatgccgcaaaaactgtcgcagatcgtcattcacttcaaggaaacgccgcactacatcttcgccccggaacagcgtttgcagatcggtaacaagctgatcatccgcctgcaaccggacgaaggcatttctttacgggtgatgaccaaggagcagggcctggacaagggcatgcaactgcgcagtggcccattgcagctgaatttttccgatgcctggcgcagtgcacgaattccggatgcctacgagcggctgttgctcgaagtgatgcgcggcaaccagaacctgttcgtgcgcaaggacgaaatcgagtatgcctggaagtggtgcgaccagttgatcgccggctggcgtaatgcgggcgatgcgcccaagccatacgcggcgggctcctgggggccgatgagctcgattgcactgatcacacgcgatgggagggcgtggtatggggatatctga

SEQ ID NO: 172 - protein, 489 aa, Pseudomonas putida
MAAISVEPCTFALFGALGDLALRKLFPALYQLDRANLLHPDTRLLALAREVGSAQEHLDSIEAHLRRHVPEADIEPAALGRFLARLNYQHLDFLQPEGYQALAEQLPGELPLIAYFATAAAVYGAICENLDKVGLAARTRVVLEKPIGHDLESSRRVNDAVARFFPESRVYRIDHYLGKETVQNLIALRFANSLFETQWNQNSISHVEITVAEKVGIEGRWGYFDKAGQLRDMIQNHLLQLLCLIAMDPPSELSADAIRDEKVKVLKALAPITGDGLSTSVVRGQYIAGYSEGKPVPGYLEEDNANAQSDTETFVALRADIRNWRWSGVPFYLRTGKRMPQKLSQIVIHFKETPHYIFAPEQRLQIGNKLIIRLQPDEGISLRVMTKEQGLDKGMQLRSGPLQLNFSDAWRSARIPDAYERLLLEVMRGNQNLFVRKDEIEYAWKWCDQLIAGWRNAGDAPKPYAAGSWGPMSSIALITRDGRAWYGDI

SEQ ID NO: 173 - DNA, 1485 bp, Lactobacillus plantarum
  CDS (1)..(1485)
atgagtaacgaaaaaattgccttattcaccatctttggcggtactggtgacctcgcacagcgtaaactgtacccgtcactatttaagctctatcaaaagggctatctcaaggaccactttgccgttattgggacggctcggcgtccttggactgatgatcactatcatgaagttattagtgactccctagctgatctgaatgctgatcaggaaacggtgacgcaatttgcgagccatttttattatcaatcgcatgacgttactgatgctgaacattaccgaactttgaaaaaattatcagaaaagctggacgcccaatatggtttacaaggcaaccggatcttctacttagcaatggcaccaaacttcttcggtacgattgcccaacacttacgttccgaaaatattctgacagataacggttttaaccgcgtcattatcgaaaagccttttggtcatgattatgaaagtgccaaggaacttaacgaccaattaacggctacttttaacgaaaatcagatttatcgaattgaccactaccttggtaaagaaatgattcaaaatatcacggccattcgttttggcaataatatttgggaatcattatggaacaaccgttacatcgacaatgtccaaattacgttaagtgaaaaactgggtgtcgaagaacgggccgtttactatgataacagcggtgccttgcgggatatggtccaaaatcacattttgcaaattttgagtctgttaacaatggatcaaccagttgaattcactgaaaatgatatcgacgtggaaaaggtcaaggctttacggagcttacgaccacttaaaccagaagaagtcgcaaccaactttgtccgtggtcaatacggtgccggcgatgatgctaaagcttaccgcgacgaagataagatttcatcagattctaacaccgatactttcgtcgctggtaaagtcatgatcgataattatcggtggtccggagtgccgttttacatccggactgggaaacgcttagccgataagttcacgcgaatcgacgtggtgttcaaacggccagtcgtcaatatcttcaatcatgaagacgtccgagctaatgacgacgcagcaaccagtctcgatccaaacatcttgacaatcaacgttgaaccgactgaaggcttcgagctccgcatgaatgctaaagcaatcggccaaggcttcgcaaccaccccggtcaagttgaattattctcacgatgctgaagccacggctggtagcccagaagcttacgaacgtttgcttcacgatgccttaaatggcgacgcaaccaactttacccactggcaagaggttgccgattcgtggaaattcgttgacgtcattcaaaaatactgggatgaacatcaacccgaatttccaaactaccgccctggtacaatgggaccagatgcggccgatgaattattacgtcaagatggtcaccgctgggtctaccgcaactag

SEQ ID NO: 174 - protein, 494 aa, Lactobacillus plantarum
MSNEKIALFTIFGGTGDLAQRKLYPSLFKLYQKGYLKDHFAVIGTARRPWTDDHYHEVISDSLADLNADQETVTQFASHFYYQSHDVTDAEHYRTLKKLSEKLDAQYGLQGNRIFYLAMAPNFFGTIAQHLRSENILTDNGFNRVIIEKPFGHDYESAKELNDQLTATFNENQIYRIDHYLGKEMIQNITAIRFGNNIWESLWNNRYIDNVQITLSEKLGVEERAVYYDNSGALRDMVQNHILQILSLLTMDQPVEFTENDIDVEKVKALRSLRPLKPEEVATNFVRGQYGAGDDAKAYRDEDKISSDSNTDTFVAGKVMIDNYRWSGVPFYIRTGKRLADKFTRIDVVFKRPVVNIFNHEDVRANDDAATSLDPNILTINVEPTEGFELRMNAKAIGQGFATTPVKLNYSHDAEATAGSPEAYERLLHDALNGDATNFTHWQEVADSWKFVDVIQKYWDEHQPEFPNYRPGTMGPDAADELLRQDGHRWVYRN

SEQ ID NO: 175 - DNA, 1440 bp, Clostridium tetani
  CDS (1)..(1440)
atgaaaaataaagccattaccatatttgggggaacaggagatttagcctatcgaaaattattcccttctctatataatttatatatgttagggagtattaatgatgaatattctattataggaattggtaggagagattatacaaaagaggattatttaacttatattcaagcaggagttaaaaagtttgccagaataaattatagtgatgataagtttgataagttttctaaaattataacctattataaaatggatattcaaaaggaagaagaatataagggtttaattaaatattataaagataaagatattattaaaaatcatatttactattatgcagttgcaccaagattttttattccaataactaaaggattaaaaaataataaatgttaccttaaagatgcaaaagttattattgaaaagccttttggagaagatttagaatcagctacttacctaaatgaacagctttcttttgtatttaaggacaagaatatttatcatattgatcattatttaggcaaagaaatgatacaaaatattataaatataagatttgccaacgcaatatttaaaggaatttggaacaaagattttattgagaatatacaaattaatgcttttgaaagcataggtgttaacaatagaggtggctattatgaccaaagtggtgcattaaaagatatggttcaaaatcatctatttcaattattgtccatagtagctatggaagaacccaaagaatttaatagtgattttattcatgaagctcaactcaaggtattaactgaaatgaagccaatagaggatagggatattgataattacttagttatgggtcaatatgaaggatatagggaagaaaaagatgttaatctaaaatcaaaaacagaaacttatgttgctatgaaaataataattgataatgaaagatggcaaggtgtacctttctatattcgtacaggtaaaaagctaaataagagagaaacggaaattataattaaatttaaatcaacaaataaaaatatagaaggaaatttattaattataaaaattcaaccagatgagggaatttatttaaaatttaatataaagaaacctggtactgtggatgagattcaaaaagtaagtatggatttttgtcaaagctgtattttagagaatagaattaatacgccagaagcctatgaaagattattaaaagcatgtatggattcagatagaagtttattttcaaaatgggagcaaattgtagtaagttggaaatatatcaacaaagttttagaaagttatagatcttattcaaataaactttataggtataagccggagacaattggaccaaaggaggcagaagagttagttaaaaaggataatcattattggataaatgatgaaagtaatagttgcttaaaacaaggagaggatagttaa

SEQ ID NO: 176 - protein, 479 aa, Clostridium tetani
MKNKAITIFGGTGDLAYRKLFPSLYNLYMLGSINDEYSIIGIGRRDYTKEDYLTYIQAGVKKFARINYSDDKFDKFSKIITYYKMDIQKEEEYKGLIKYYKDKDIIKNHIYYYAVAPRFFIPITKGLKNNKCYLKDAKVIIEKPFGEDLESATYLNEQLSFVFKDKNIYHIDHYLGKEMIQNIINIRFANAIFKGIWNKDFIENIQINAFESIGVNNRGGYYDQSGALKDMVQNHLFQLLSIVAMEEPKEFNSDFIHEAQLKVLTEMKPIEDRDIDNYLVMGQYEGYREEKDVNLKSKTETYVAMKIIIDNERWQGVPFYIRTGKKLNKRETEIIIKFKSTNKNIEGNLLIIKIQPDEGIYLKFNIKKPGTVDEIQKVSMDFCQSCILENRINTPEAYERLLKACMDSDRSLFSKWEQIVVSWKYINKVLESYRSYSNKLYRYKPETIGPKEAEELVKKDNHYWINDESNSCLKQGEDS

SEQ ID NO: 177 - DNA, 1512 bp, Bradyrhizobium japonicum
  CDS (1)..(1512)
atgacaaaagacccgcaagccaagcgcaagccggaaaattgcgccttcgtcatctttggcgtgaccggagaccttactcatcgccttgtgatgccctcgctctacaatctcgcggccgagcacctgttaccggaaaagttctgtgtcgtcggcgtggcccgcaagggccaatcggatgacgagctgcgcagcagcctgttgaagggcctgcgccagttcgcgacgcgacccgtggacgacgatatcgcccagaagctgctgcaatgcctgaccttcgtcgaggccgacccgaaggactcgccgtccttcgaccgcttgcgcgagcatctggattcgctggaatgcgcgcaggacaccggcggcaaccggctgttctatctggcaacgccgcccgccgcgttcgcgccgaccgcgcgcgagctcggccgcaccggcatgatggaggagaacggcgcctggcgacgcctcgtgatcgaaaagccgttcggcaccgatctcgcctcggcacgcgcgctgaacgccgagctcctgaagatcatggacgagcaccagatctaccggatcgatcactatctcggcaaggagacggtgcagaacattttggtgctgcgctttgccaacggcatgttcgagccgatctggaatcgcaaccacatcgaccacatccagatcacggtggaagagaagctcggcgtcggccatcgcggcggcttctacgacgccaccggcgcgctgcgcgacatggtaccgaaccatctgttccagctgatgtcgctggtcgcgatggagccccccgcccgcttcgacgcgcattccgtgcgctccgagaaggccgacgtgctcacctcgatccagcagcccagccgggaagaggcgctgaagaattcagtgcgcgcgcaatatctcgccggccgcatcggcgacgaggagatcacggactatcgcaagaccgaggacgtcaagcccggcagcaccaccgagacctttgtcgcgctcaagctgatgatcgacaattggcgctgggccggcgtccccttctacttgcgcaccggcaaggcgctgggtcacaagcgcaccgaagtcgcgatcaagttcaagcaggcgccgctgtcgatgttttcgggcacggacgtcgaccgcctgtcgcagaacttccttaccatcggcatcgcgccgaccgagaccatcgagcttcagttcaacgccaagattccgggcccgagcatcaccatcgacggcgtcgagatgaagttccgctatggcgactatttccgcgtcgatccctcgaccggctacgagacgctgatctacgactgcatgatcggcgacaacatactgttccagcgcgccgacggcatcgaggccggatggcaggcggtgcagccgttcctggacgcctggaagagcgagggcaccaacggcatcgagacctatgaagccggcagcgacggccccgcctgcgcggacgagctgctccggcgcgacggacgaagctggcggaagttttcgtga

SEQ ID NO: 178 - protein, 503 aa, Bradyrhizobium japonicum
MTKDPQAKRKPENCAFVIFGVTGDLTHRLVMPSLYNLAAEHLLPEKFCVVGVARKGQSDDELRSSLLKGLRQFATRPVDDDIAQKLLQCLTFVEADPKDSPSFDRLREHLDSLECAQDTGGNRLFYLATPPAAFAPTARELGRTGMMEENGAWRRLVIEKPFGTDLASARALNAELLKIMDEHQIYRIDHYLGKETVQNILVLRFANGMFEPIWNRNHIDHIQITVEEKLGVGHRGGFYDATGALRDMVPNHLFQLMSLVAMEPPARFDAHSVRSEKADVLTSIQQPSREEALKNSVRAQYLAGRIGDEEITDYRKTEDVKPGSTTETFVALKLMIDNWRWAGVPFYLRTGKALGHKRTEVAIKFKQAPLSMFSGTDVDRLSQNFLTIGIAPTETIELQFNAKIPGPSITIDGVEMKFRYGDYFRVDPSTGYETLIYDCMIGDNILFQRADGIEAGWQAVQPFLDAWKSEGTNGIETYEAGSDGPACADELLRRDGRSWRKFS

SEQ ID NO: 179 - DNA, 1497 bp, Bacteroides thetaiotaomicron
  CDS (1)..(1497)
atggataaatttgcaatgattatttttggtgcttcgggcgacttgactaaacgcaagttgatgcccgcattgtactctctgtatcgggataaacggctgacggggagttttactgttctgggaattgggcgtactgtctattctgatgaagattaccgttcatatatacttggggagttgcagcagtttgtaaaggctgaagagcagaatttggagctgatgtcttcttttgtgtctcatttgtattatttgccgatggatcctgcgaaagtggagggatattcgcagttgcgggagcgtttggtagagcttacgaaggaggtcgatccggataatttgttgttctatctggctactccgccttcgctgtatggggtggtgcctttgcatttgaaggcggccgggctgaatactcctcattctcgtattattgttgagaagccgttcgggtatgatctggagtcggcgcttgagttgaataagatttactcttctgtgtttgatgagcatcagatttatcgtatcgatcattttctgggcaaggagacggcgcagaatgtgcttgctttccgtttcgccaatggtatttttgagccgttatggaatcgtaattatattgattatgtggagattactgctgtagagaatctgggtattgagcagcgcggaggtttttacgagacggcgggggctttgcgggatatggtgcagaatcacctgattcagctcgtagctcttacggctatggagccgccggcggtattcaatgcggataatttccggaatgaggtagtgaaggtttatgagtcgctgactccgcttacggagacggacttgaatgaacatatcgttcgcggacaatatacggcttcgggcaataagaaggggtatcgtgaggaaaagggagtggctcccgactcgcgtacggagacttatattgcgatgaagctgggcatcagtaactggcgttggagcggggtaccgttctacatccgcaccggtaagcagatgccgacgaaggtgacggaaattgtcgttcacttccgcgagacgccccatcagatgttccgctgttccggcggtaactgtccgagggctaataagttgatccttcgtttgcaaccaaacgagggtattgtgttgaagatcggaatgaaggttccgggtgcaggtttcgaagtccgtcaggtgacgatggatttcagttacgcacagttgggcggcgtgccgagcggtgacgcttatgcccgtctgattgacgactgcattcagggagatccgaccttatttactcgaagtgatgctgtagaggcttcctggaacttctttgatccggtcttacgttattggaaagataatccggacgcacctttgtacggctatccggcaggtacgtggggacctctcgaaagtgaagctatgatgcacgagcatggggcagactggaccaatccgtgtaagaatttaacaaatacagaccaatattgcgaactatga

SEQ ID NO: 180 - protein, 498 aa, Bacteroides thetaiotaomicron
MDKFAMIIFGASGDLTKRKLMPALYSLYRDKRLTGSFTVLGIGRTVYSDEDYRSYILGELQQFVKAEEQNLELMSSFVSHLYYLPMDPAKVEGYSQLRERLVELTKEVDPDNLLFYLATPPSLYGVVPLHLKAAGLNTPHSRIIVEKPFGYDLESALELNKIYSSVFDEHQIYRIDHFLGKETAQNVLAFRFANGIFEPLWNRNYIDYVEITAVENLGIEQRGGFYETAGALRDMVQNHLIQLVALTAMEPPAVFNADNFRNEVVKVYESLTPLTETDLNEHIVRGQYTASGNKKGYREEKGVAPDSRTETYIAMKLGISNWRWSGVPFYIRTGKQMPTKVTEIVVHFRETPHQMFRCSGGNCPRANKLILRLQPNEGIVLKIGMKVPGAGFEVRQVTMDFSYAQLGGVPSGDAYARLIDDCIQGDPTLFTRSDAVEASWNFFDPVLRYWKDNPDAPLYGYPAGTWGPLESEAMMHEHGADWTNPCKNLTNTDQYCEL

SEQ ID NO: 181 - DNA, 1485 bp, Staphylococcus epidermidis
  CDS (1)..(1485)
atgagtactaaacaaaaacacattccctgtttgattacaatattcggtgccacaggagatttgagtcatagaaagctatttccttctatattccatttatatcaacaagacaatttagatgaacatattgctattattggtataggacgtcgcgattataataacgaacaatttcgcgaccaagttaaaacgtcaattcaaacttatgttaaagatacagatagaattgatgagtttatgacgcatgttttttatcataaaactgacgtgagtgataaagaaagttatcagtcattacttcaatttagtgagcgactagattcagaatttgctttaggtgggaatcgtctgttttacttagcgatggcaccacaattttttggagtgatctcagattaccttaaatcttctggtcttactcaaactacaggatttaaacgcttagttatagagaaaccatttggcagtgatcttaaatctgctgaatcattaaataatcaaataagacgttcgtttaaagaagaagaaatttatcggatagatcactatcttggcaaagatatggtgcaaaatatagaagttttgcgattcgcaaacgcgatgtttgaacctttatggaataataaatacatttcaaatattcaagttacatcatcagaagtattaggtgtcgaagatcgtggtggctactatgaatctagtggtgcacttaaagacatggtacaaaatcacatgctacagatggttgctttacttgcaatggaagcaccgataagtttgaatagtgaagatatacgtgcagaaaaagtcaaagtacttaaatctcttagacaattaaaaccagaagaagttaaaaagaatttcgtgcgtggtcaatatgatcaaggcaatatagatggtaaacaggttaagtcatatcgagaagaagatcgcgtagcaaaggattcggttacaccgacatttgtatcgggtaaattaacaattgataactttagatgggctggagttcctttctacattagaacgggtaaacgtatgaaatcaaaaacgatacaagtcgtagtagaatttaaagaagtacctatgaatttatattatgaaactgacaatttactagattctaatttgctagtcattaatattcaaccaaatgaaggaatttcattgcatttaaatgctaaaaagaacattcaaggaattgatactgagccagtgcaattatcatacgcaatgagtgctcaagataaaatgaatacagttgatgcatatgaaaacttattgtttgattgtcttaaaggtgatgcgactaattttacacattgggaagaattaaaatctacttggaaatttgtagatgcaatccaagatcaatggacaatggttgaaccatgtttccctaactatgaagcgggtacaaatggacctcttgaaagtgatcttttattaagtcgtgatggaaatcattggtgggatgatatccactaa

SEQ ID NO: 182 - protein, 494 aa, Staphylococcus epidermidis
MSTKQKHIPCLITIFGATGDLSHRKLFPSIFHLYQQDNLDEHIAIIGIGRRDYNNEQFRDQVKTSIQTYVKDTDRIDEFMTHVFYHKTDVSDKESYQSLLQFSERLDSEFALGGNRLFYLAMAPQFFGVISDYLKSSGLTQTTGFKRLVIEKPFGSDLKSAESLNNQIRRSFKEEEIYRIDHYLGKDMVQNIEVLRFANAMFEPLWNNKYISNIQVTSSEVLGVEDRGGYYESSGALKDMVQNHMLQMVALLAMEAPISLNSEDIRAEKVKVLKSLRQLKPEEVKKNFVRGQYDQGNIDGKQVKSYREEDRVAKDSVTPTFVSGKLTIDNFRWAGVPFYIRTGKRMKSKTIQVVVEFKEVPMNLYYETDNLLDSNLLVINIQPNEGISLHLNAKKNIQGIDTEPVQLSYAMSAQDKMNTVDAYENLLFDCLKGDATNFTHWEELKSTWKFVDAIQDQWTMVEPCFPNYEAGTNGPLESDLLLSRDGNHWWDDIH

SEQ ID NO: 183 - DNA, 1590 bp, Yersinia pestis
  CDS (1)..(1590)
atgaccttttttgacgcatttttatctgggtttactggctatagtcaaagagagtacattagtaatgtaagaaaattacaaatatcctgcaacgaggagaatagcatggcagtaatgaatacagtccaggtagcccaggcgtgtgacctggtgattttcggcgctaaaggtgatttggctcgccggaaactgctgccttctctttaccaattagaaaaagcgggtcatatccacccagatactcggataatcggtgttggccgtgctgagtgggataaagatgcgtacaccgctgtggtaaaggaagccctcgatacctttatgaaagagccgctggatgacgagctatggcaaaaactcagctcgcgcctcgacttctgcaatctggatgtgaatgacagtaagcatttcaccaaattaggtaaaatgctcgatcaaaaacatcgcaccacgattaactactttgctatgccgccgagtacatttggtgcgatttgtaaaggcctgggagaagccgggttaaacaaagagcctagccgagtggtaatggaaaaaccattgggaaccgatttagcgccctcaagggtaattaacgatcaggtagccgagtatttcaacgaatgtcaggtttaccgtattgaccactatttagggaaagaaacggtattaaacctgttggcgcttcgcttcgctaactcgttgttcgcctcaaactgggacaaccgcactatcgatcatgtgcaaattaccgtcgcagaagaggtcggaattgaagggcgttggggctattttgatcaggccggtcagatgcgtgacatgatccaaaaccatctgttgcaaatcctgacgatgatcgccatgtcaccccccgcagatctcagtacggatcgcatccgtgatgaaaaagtaaaagtactgcgttcgctgcgccgtattgatcacaccaatgtgcgcgaaactacagttcgtgggcaatatactgccggctttgtacagggcaataaagtgccgggttatctggaagaggaaggcgcgaataagaatagcaataccgaaacatttgtgtctattcgggtggatatcgatgactggcgttgggctggggtacctttctacctgagaaccggtaagcgcctacccagcaaatgctctgaagttgtggtttactttaagaaccccgcactgaatctcttccgcgaatcttatcaacaactgccacaaaacaaactgacaattcgtttgcaaccggacgaagggatcgaaattgaagtgctgaataaagtccccggattggaacataagcatcgtttacaaaccactaagcttgatctcagtttctccaaaaccttcaatgagcagcatattgctgatgcctatgaacgtctgctactggagaccatgcggggtattcaagcgctgtttgtgcgccgtgatgaggtcgaagaggcgtggaaatgggtcgattctattatgaatgcgtgggcggcagataatgaagcaccaaaaccataccagtccggtacatgggggcctgtggcatccgttgctatgatcacccgtgatggccggtcatggaatgagttcgagtaa

SEQ ID NO: 184 - protein, 529 aa, Yersinia pestis
MTFFDAFLSGFTGYSQREYISNVRKLQISCNEENSMAVMNTVQVAQACDLVIFGAKGDLARRKLLPSLYQLEKAGHIHPDTRIIGVGRAEWDKDAYTAVVKEALDTFMKEPLDDELWQKLSSRLDFCNLDVNDSKHFTKLGKMLDQKHRTTINYFAMPPSTFGAICKGLGEAGLNKEPSRVVMEKPLGTDLAPSRVINDQVAEYFNECQVYRIDHYLGKETVLNLLALRFANSLFASNWDNRTIDHVQITVAEEVGIEGRWGYFDQAGQMRDMIQNHLLQILTMIAMSPPADLSTDRIRDEKVKVLRSLRRIDHTNVRETTVRGQYTAGFVQGNKVPGYLEEEGANKNSNTETFVSIRVDIDDWRWAGVPFYLRTGKRLPSKCSEVVVYFKNPALNLFRESYQQLPQNKLTIRLQPDEGIEIEVLNKVPGLEHKHRLQTTKLDLSFSKTFNEQHIADAYERLLLETMRGIQALFVRRDEVEEAWKWVDSIMNAWAADNEAPKPYQSGTWGPVASVAMITRDGRSWNEFE

SEQ ID NO: 185 - DNA, 1506 bp, Vibrio vulnificus
  CDS (1)..(1506)
atgatggtaataccagaaaacagcagcatcgtaatttttggtgcttcaggtgatttaacatatcgcaagttgatccctgctttataccacctctacgcaagtaagcagctaccagaaaactttgctattttaggtgtcagccgcactgaatacagcgatgaatcttatcgcgaaaagttaaagcgctctcttcaggaaatggagaaaacggaaccagctattctggattcatttatcgaccatcttcactatcaagccatcaacacgtcagacacaaaagactacgcgaagttggttgtacgtttagatgaattggccgctcaataccagttcgaacaacgtaatacactgttttatctggccacaccgccaagcctttacagtgttattcctgcaagccttgctcatcacggtctcaatagtgaagaggatggttggaagcgcctgatcattgaaaaaccgtttggttatgatttggcttcggcacgtcagctcgacaaagaaatacacgattgcttccaagagcatcagatctatcgcatcgaccactaccttggaaaagagaccgtacaaaacttacttgttttccgtttctctaacgccatgtttgaacctctgtggaaccgcaacttcattgattatgtggaaatcacaggtgccgaattccttggtgtggaagagcgcggtggttattacgacggctccggcgctgtgcgcgatatgttccaaaaccacctactgcaagtgttggcgatggtgggcatggagccgccagcacaaattaacgccgattccatgcgtgatgaagtagtgaaagttctgcagtgtttaaaaccgcttgaggaagatgatctgcgtaacaacctagttttgggtcaatacaccgcatcagacgtgcgcggacaacatctgcttggctaccgtgaagaaaacggcgtagcggacgattctcgtaccgagacttacattggtcttaaagcgtacatcaataactggcgttggaatggcgtaccattctacgtgcgcacgggtaagcgtcttccaactcgcgtgacagaagtggttatccacttcaaacaaacaccgcatccggtatttggccaaaacgctccagaaaacaaactgatcattcgtattcagcctgatgaaggcattcaaatgagcttcggtttgaaagaacccggtgcaggctttaaagccaaagaagtgaagatgaacttccattatgcttcgttgcaagagacgcaaatgctgaccgcctatgagcgtctgcttcttgatgcgttaaacggcgacgcaacgctgtttgctcgcagcgatgcggtcgaagcgtgttggaaatacgttcaacctatcctcgatttcaaacaagatccacaagcactctttggttatgcttgcggtacttgggggccaaaagagtcggacgatttgctgcagcgtgatgatcgcgcgtggcgtttcccatgcaaaaacctaacagatacggactactgcgaactatga

SEQ ID NO: 186 - protein, 501 aa, Vibrio vulnificus
MMVIPENSSIVIFGASGDLTYRKLIPALYHLYASKQLPENFAILGVSRTEYSDESYREKLKRSLQEMEKTEPAILDSFIDHLHYQAINTSDTKDYAKLVVRLDELAAQYQFEQRNTLFYLATPPSLYSVIPASLAHHGLNSEEDGWKRLIIEKPFGYDLASARQLDKEIHDCFQEHQIYRIDHYLGKETVQNLLVFRFSNAMFEPLWNRNFIDYVEITGAEFLGVEERGGYYDGSGAVRDMFQNHLLQVLAMVGMEPPAQINADSMRDEVVKVLQCLKPLEEDDLRNNLVLGQYTASDVRGQHLLGYREENGVADDSRTETYIGLKAYINNWRWNGVPFYVRTGKRLPTRVTEVVIHFKQTPHPVFGQNAPENKLIIRIQPDEGIQMSFGLKEPGAGFKAKEVKMNFHYASLQETQMLTAYERLLLDALNGDATLFARSDAVEACWKYVQPILDFKQDPQALFGYACGTWGPKESDDLLQRDDRAWRFPCKNLTDTDYCEL

SEQ ID NO: 187 - DNA, 1530 bp, Synechococcus elongatus
  CDS (1)..(1530)
atggtaaccctatttgaaaatcccctgcgggttggactacgccaagagcgaaccccagagccgctgattttagtcatttttggtgccagtggcgaccttactcagcgcaagctgattccctcgatttatcaactgagactcgaacgccgtctgccccccgaactgaccattgttggcgtggcgcggcgcaactggagtcatgactattttcgcaagcacctccgtcaaggggtcgaggagtttggtggcggcattcaggcggaacccctgtggcaggaatttgcccaaggtttgttttattgctctggcaatatcgatgatcccgccgcctacacccagctgaaaacactgctagctgagctagatgaaaaacgccaaactcgcagcaatcgcgtcttttaccttgcggtctcaccgagctttttcgttgaggccattcagcaactgggggcagcggggctattgagtgatccccaaaaacatcgtcttgtgattgaaaagccctttggccgtgatctcacctctgcccaagccctcaatgaggtggtgcagtcggtgtgcaaggaggagcaagtttaccgcattgaccactacctcggtaaagagacggtgcaaaacctgatggtgtttcgctttgccaatgccatttttgaacccctctggaaccgccagtacgtggatcatgtgcagattactgttgctgaaaccgtcggggtggaagatcgcgcgggctactatgaaactgcgggtgccctgcgggacatggtgcaaaaccacattctccagttgctggctctgaccgcgatggaaccccccaatgccctcgatgccgatagtctgcgtagcgaaaaggtgaaagtcctccaagctacccgtttagcggatcttgataatctcgatgcctgtgctgtccgcggccaataccgagccggctggatgaagggcaaacctgttgtgggctatcgtcaggagccgggggtgagtcctacctccaccactcccacctatgcggccctaaaactagggattgataactggcggtggcagggggtgcccttctatgtgcgcacgggtaaacgcttggcaaaaaaggtcacagaaatctcaattcagtttcgtggggtgcctttactgattttccagtcggccgcccgccaaaccaatcccaatatcctgacgatgcgcattcaacccaatgaagggattgctctgcgctttgaggcaaaaatgccgggtgcagatctgcgcacacgcacggtggaaatggactttagctacggctcctcctttggaatggccacagcggatgcctatgcgcggttattactggactgcatgttgggggaccaaaccctgtttacgcgcgcagatgaggtagaggcggcttggcgggtggtgatgccggttttaacggcttgggacgcccccacagatccagaggccatacccacctatgacgcggggacttgggggcccgatgcggcagaagtgatgattaatgccgatggccggcgctggcggcgactttga

SEQ ID NO: 188 - protein, 509 aa, Synechococcus elongatus
MVTLFENPLRVGLRQERTPEPLILVIFGASGDLTQRKLIPSIYQLRLERRLPPELTIVGVARRNWSHDYFRKHLRQGVEEFGGGIQAEPLWQEFAQGLFYCSGNIDDPAAYTQLKTLLAELDEKRQTRSNRVFYLAVSPSFFVEAIQQLGAAGLLSDPQKHRLVIEKPFGRDLTSAQALNEVVQSVCKEEQVYRIDHYLGKETVQNLMVFRFANAIFEPLWNRQYVDHVQITVAETVGVEDRAGYYETAGALRDMVQNHILQLLALTAMEPPNALDADSLRSEKVKVLQATRLADLDNLDACAVRGQYRAGWMKGKPVVGYRQEPGVSPTSTTPTYAALKLGIDNWRWQGVPFYVRTGKRLAKKVTEISIQFRGVPLLIFQSAARQTNPNILTMRIQPNEGIALRFEAKMPGADLRTRTVEMDFSYGSSFGMATADAYARLLLDCMLGDQTLFTRADEVEAAWRVVMPVLTAWDAPTDPEAIPTYDAGTWGPDAAEVMINADGRRWRRL

SEQ ID NO: 189 - DNA, 1473 bp, Shewanella oneidensis
  CDS (1)..(1473)
atgggcaaaacaacatcaggcgccaaagcttgtgacttcgtactctttggtactaaaggtgacttagcaagacgtaagttattaccttctttataccagttagataaggctgagcttctcgataaagatactaaggtgataggtgtcgcaaaagatgaattcagtcaggatgaatacagagacttagtcatccttgcgttaaaaaccttcgtcaaagaacccctctgcgaagacactctcaaccgattcgtgtcccgttgttattatgtaggcactaattttaccgaatcagcaggctacggtgccttccatgaattgctcaaaccagaagagcgtgtcatggtcagttactttgccacccctccatcgatttttggtgatatctgccgctgtttacatgaacaaaacctgatccacagtgactctcgcgtagtactcgaaaaacccattggctctgatctcgcatcttcccgtattattaacgatcaagtgtctgcctactttaaagaaagccaagtctaccgtatcgaccattatcttggtaaagagaccgttcaaaacttgattgcgctgcgttttgctaactccttatttgcctctaaatgggataaccggaccattgaccatgtccagatcacggttgcggaagaagtcggtattgaaggccgttggggttacttcgataaagccggtcaaatgcgcgatatgatccaaaaccacttgctacaggtgctgacgctcgtcgcaatggatccgccagtgaacttagatgctgatagtattcgcgatgaaaaggtgaaagtgcttaagtcgctgcggccgattaatgctgacaatgtgtatgaaaacactgtccgtggtcagtacagtgcgggcttcctgaaaggtagtccggtgccaggctatttagaggaagagggcgcgaacgtacagtcacacaccgaaacttttgtggcgttgcgggtcgatatcgataactggcgttgggctggggtgccgttttatctgcgcagcggtaagcgcatgccgtttaagagttctgaaattgtggtgtattttaaaaatcctccgcacaacctttaccgctctagctaccgtaacttgccacctaacaagttaaccatccgtctgcaaccacacgaaggggttgagatccagatgatgaacaaggtgccaggattagagcaaaaacaacgtttgcaaaccactaagctcgacttgagtttctcggatacctttaaaaacgagcgcattgccgatgcctacgagcgtttgttgcttgaagccatgctcggtaatcaagctttgttcgtgcgccgagatgaagtggagcaagcctggacatgggtggatggcatcatccaagcatgggaacagagcaatgagaaaccgaaaccttatcctgcgggcacttggggccctgtggcttcggtcgcgctgatcaccaaagatggtcgctcgtgggatgaatag

SEQ ID NO: 190 - protein, 490 aa, Shewanella oneidensis
MGKTTSGAKACDFVLFGTKGDLARRKLLPSLYQLDKAELLDKDTKVIGVAKDEFSQDEYRDLVILALKTFVKEPLCEDTLNRFVSRCYYVGTNFTESAGYGAFHELLKPEERVMVSYFATPPSIFGDICRCLHEQNLIHSDSRVVLEKPIGSDLASSRIINDQVSAYFKESQVYRIDHYLGKETVQNLIALRFANSLFASKWDNRTIDHVQITVAEEVGIEGRWGYFDKAGQMRDMIQNHLLQVLTLVAMDPPVNLDADSIRDEKVKVLKSLRPINADNVYENTVRGQYSAGFLKGSPVPGYLEEEGANVQSHTETFVALRVDIDNWRWAGVPFYLRSGKRMPFKSSEIVVYFKNPPHNLYRSSYRNLPPNKLTIRLQPHEGVEIQMMNKVPGLEQKQRLQTTKLDLSFSDTFKNERIADAYERLLLEAMLGNQALFVRRDEVEQAWTWVDGIIQAWEQSNEKPKPYPAGTWGPVASVALITKDGRSWDE

SEQ ID NO: 191 - DNA, 1476 bp, Oceanobacillus iheyensis
  CDS (1)..(1476)
atggaacaaactatacagccaagagccgttattgtaatcttcggagcaactggagatttagcaaagcgtaaattattcccttccatttatcgtttgtaccgaagcggaaaattagatgagcattttgcagtaattggtttagcacgtcgtccttggacagatgaagtacttagagaaaatgtggaaaattccatacaagatgctctttctccggatgaggatttatccgaatttatttcccatttctattataaatcttttgatgtgacggaaaaagaatcgtatcaaggacttaatgaaatcattcaaaaccttgaaggtcaataccaaacagaaggaaatagactattttatctggcaatggctccagatttctttggtgctattgcaaatcaactcaatgattatggattaaagaacacgagtggttggactagacttgtgatcgaaaaaccatttggacatgatttaccttctgctaaaaagttaaaccatgaattacaagccgcatttcgtgaagatcaaatttatcgtatcgaccactatctaggtaaagagatggtgcaaaatattgaagtaatccgttttgccaacggtatttttgaacatttgtggaataatcgctttatctcaaacatccaaattacgagtagcgaaacgcttggagtagaggaacgagcacgttattatgacacttctggtgctacgcgggatatggttcaaaatcatatgttacaaatggttgctctactggcgatggaacctccgattagtttaacaacagaggaagtacgctctgaaaaaattaaagtattgcgtgccttaagaatgatggagacaaatgaaatagatgattatttcattcgcggtcaatacggtgctggtacagttaaaggtaattctgttattggttatcaagacgaagatgaacaactagaaaattctcgtactgaaacatttgtagctggaaaacttctcattgacaattaccgatgggcaggcgttcctttctatattcgtacaggaaagcgcatgacagaaaaatccacaaaaattgtaattgagttcaaagacattccaatgaatctttattaccaaaaagatgatcaaaggaatccaaatttattggttattaatattcaaccaaatgaaggaattacgctttgcttgaatgcacgtaaatcaggtgaaggtgcactagcagagccaattcaattagcataccaccaaaatgctgtatctggaatcaatacaccagaagcatatgaaaaactaatttacgatagtatgcttggtgatgcgactaactttacccattgggatgaagttgctttatcttggcaatttgtcgataagattttggaaaactggtcagaaaatcaaccagcattccctaattatcgttctggatcgatgggaccagaagcatctgatgaactgttgaaaaaagatggtttccattggtggccaatctaa

SEQ ID NO: 192 - protein, 491 aa, Oceanobacillus iheyensis
MEQTIQPRAVIVIFGATGDLAKRKLFPSIYRLYRSGKLDEHFAVIGLARRPWTDEVLRENVENSIQDALSPDEDLSEFISHFYYKSFDVTEKESYQGLNEIIQNLEGQYQTEGNRLFYLAMAPDFFGAIANQLNDYGLKNTSGWTRLVIEKPFGHDLPSAKKLNHELQAAFREDQIYRIDHYLGKEMVQNIEVIRFANGIFEHLWNNRFISNIQITSSETLGVEERARYYDTSGATRDMVQNHMLQMVALLAMEPPISLTTEEVRSEKIKVLRALRMMETNEIDDYFIRGQYGAGTVKGNSVIGYQDEDEQLENSRTETFVAGKLLIDNYRWAGVPFYIRTGKRMTEKSTKIVIEFKDIPMNLYYQKDDQRNPNLLVINIQPNEGITLCLNARKSGEGALAEPIQLAYHQNAVSGINTPEAYEKLIYDSMLGDATNFTHWDEVALSWQFVDKILENWSENQPAFPNYRSGSMGPEASDELLKKDGFHWWPI

SEQ ID NO: 193 - DNA, 1344 bp, Corynebacterium efficiens
  CDS (1)..(1344)
atgactcccacaggacacgaccaccggcagaccgtgacgttctacatcctcggcggcgcgggagatctcgtgcgtcgtctgctcatccccggtatggcggggtacctccgggagtatgagggcacccggatcaacatcgtcgccacggggcgttcggagatcgacgactacccgcagctggtgcgcgattccctcgccgcagccggcacagacatcgatgaccgggtggtcgacagcctggccgggcatgcctctttcctggcgtcggatgccactgatccggccgagctgcaggagctgctcgattcccgggaacccggtgaccgcccggtgctctacttcgcgctctcgccttccgtgaccgcgcaggccgtcgatgccctggcgggggtcaccctgcccgagggcatcgtgcttgccctggaaaaacccttcggcgaggacgcggacaccgcccgcgagctcaacgagaaattgtggaaaatcaccgatgaggagcacatcttccgcgtcgaccacttcaactgcgagaccgccctgtcgaacctggtcggactgatgggcgcgaatgcgatcctctccgccgggtggaataacagggcagtcgagagcattgagatcgtctatgacgaatccctcggcctggagggacgcgccgagttctacgacagcaatggggctgtgcgcgacatgctccaatcccacctgctgcaggtcatggcacacgccctggctgccgacaccgatgacacggtcaccgacattctcgccgccacggacatcgatccgggttccgtccgtcgcgcccggtacaccgcaggcgaggcgggtggcgaacagctgccggactacgcacaggaggagggcgtggatccggagcgggggaccgagacgctcttccagctcaccgcgcacgtggacaccgaccgctggcgtggcgtgcccatcaccctgcgttccggcaaggcactggggaaaccgcgcagggagatcgccatctcctaccggcgcgagggctaccccgaggaggtcgagctgcagccgggcagccgtctggtcttccccttcaccgatgaggtggtgctcgaggcgaatgtctccgaccatggttacagccacaacctgcagcgcgttgaactgcgcaccgaactggtgccctcgaagctgtcggcctacggccgggtggtgcgtgccatcctcgacatgagcgacaccgccgaggtgcccgccgacgccccggcccgggcctgggagatcgtggagcccgtgctcaccgcgttcgccaacgacgaggtcccgctggaggagtacccggcggggtcagcgggacctgcgggctggtag

SEQ ID NO: 194 - protein, 447 aa, Corynebacterium efficiens
MTPTGHDHRQTVTFYILGGAGDLVRRLLIPGMAGYLREYEGTRINIVATGRSEIDDYPQLVRDSLAAAGTDIDDRVVDSLAGHASFLASDATDPAELQELLDSREPGDRPVLYFALSPSVTAQAVDALAGVTLPEGIVLALEKPFGEDADTARELNEKLWKITDEEHIFRVDHFNCETALSNLVGLMGANAILSAGWNNRAVESIEIVYDESLGLEGRAEFYDSNGAVRDMLQSHLLQVMAHALAADTDDTVTDILAATDIDPGSVRRARYTAGEAGGEQLPDYAQEEGVDPERGTETLFQLTAHVDTDRWRGVPITLRSGKALGKPRREIAISYRREGYPEEVELQPGSRLVFPFTDEVVLEANVSDHGYSHNLQRVELRTELVPSKLSAYGRVVRAILDMSDTAEVPADAPARAWEIVEPVLTAFANDEVPLEEYPAGSAGPAGW

SEQ ID NO: 195 - DNA, 1545 bp, Corynebacterium efficiens
  CDS (1)..(1545)
atgagctcccacacgaatcccaccacctggattaatcccctgcgtgatccccaggacaaacgactgccccgcatcgcgggaccgtccggcctggtcatcttcggtgtcaccggtgacctcgcccgcaagaagctcctccccgcgatctatgatctggccaaccgtggtctgctccccccgggtttcgccctggtgggttacggacgccgtgactggagcaaggaggacttcgagaactacgtgcgcgaggccgtggaggccggcgcccgtaccgaattccgcggaaacgtgtgggaacgcctcgccgagggcatggaatttgtcaagggcaacttcgacgacgattccgccttcgacaatctcgcggacacgcttaagcgtctcgacgagaccaggggcaccgccggcaactgggccttctacctatccatcccgccggattccttcgcggcggtctgccaccagttggagcgctcaggtatggcggcatccacagacgaatcctggcgacgggtgatcatcgagaagcccttcggcaatgatctcaagaccgcgcatgaactcaatgagacggtcaacgctgtcttccccgaggaatcggtcttccgcatcgaccattacctgggcaaggaaaccgtccagaacattctggccctgcgtttcgccaaccagctgttcgagccgttgtggaactccaattatgtcgatcatgtgcagatcaccatggcggaggacatcggattggggggacgcgccggttattatgacggcatcggtgccgcccgtgatgtcatccagaaccacctgatccagctgctggccctggtggccatggaggagcccatctccttcacccccacccagctgcaggcagagaagatcaaggtgcttcgtgccaccaagccgagcctgccgatcgcggagaactccgcgcgtggccagtattccgccggctggcaggggtctgaatatgtcaagggtctgcgggaggaggatggtttcgatccggaatccaccaccgagacctatgccgcctgcaccctggagatcacctcccgcaggtgggcgggtgtgccgttctacctgcgcaccggcaaacgcctgggtcgtcgtgtcaccgagatcgccgtggtgttcaaggatgccccccaccagcccttcgatcccggcatgaccgcggcactcggtaacaacgccatcgtgatccgtgtgcagcccgacgagggtgtgctcatccgtttcggatccaaggtgcccggatctgccatggaggtccgtgatgtgaatatggacttctcctattccgagtccttcaccgaggaatcccccgaggcgtatgagcgtctcatcctggatgcgcttctcgatgagtccagcctcttccccaccaatgaggaagtggaactgagctggaagatcctggatccgatcctggagatctgggaggagaatggccaaccggaggagtatcccgccggcacatggggaccgaagagcgccgatgagatgctggcacgcaacggccaccagtggcgcaggccgtag

SEQ ID NO: 196 - protein, 514 aa, Corynebacterium efficiens
MSSHTNPTTWINPLRDPQDKRLPRIAGPSGLVIFGVTGDLARKKLLPAIYDLANRGLLPPGFALVGYGRRDWSKEDFENYVREAVEAGARTEFRGNVWERLAEGMEFVKGNFDDDSAFDNLADTLKRLDETRGTAGNWAFYLSIPPDSFAAVCHQLERSGMAASTDESWRRVIIEKPFGNDLKTAHELNETVNAVFPEESVFRIDHYLGKETVQNILALRFANQLFEPLWNSNYVDHVQITMAEDIGLGGRAGYYDGIGAARDVIQNHLIQLLALVAMEEPISFTPTQLQAEKIKVLRATKPSLPIAENSARGQYSAGWQGSEYVKGLREEDGFDPESTTETYAACTLEITSRRWAGVPFYLRTGKRLGRRVTEIAVVFKDAPHQPFDPGMTAALGNNAIVIRVQPDEGVLIRFGSKVPGSAMEVRDVNMDFSYSESFTEESPEAYERLILDALLDESSLFPTNEEVELSWKILDPILEIWEENGQPEEYPAGTWGPKSADEMLARNGHQWRRP

SEQ ID NO: 197 - DNA, 1668 bp, Bifidobacterium longum
  CDS (1)..(1668)
atgcgtacacgtttgcgtacgcgattggcccaacgcacggcacagcacacgcaatgtggcccaaatcgcagcccaaatcgcatatcgcctctagcgatagatagccgccggcgactacccttgtacattatgagtgaatcccccaattggagcaatcccctgcgcgactcgcgcgacctcagactgccccgtatcgccggcccatgcagcctcgtcattttcggtgtcacgggcgatctggcacaaaagaaactgctgccagccgtctacgacctggcgaaccgtggcctactgccgccgagcttcggtctgaccggcttcgcccgccgcgactggacacaggaacggttcatcgaattcgtcaaggccgccgtccaggcgcattgccgtacgccgttcaaggagtcgacttggcgcaatctggccgccggcatccgcttcgtgcagggtacgttcgacgacccggaggccttcgagcgcctgagcgccaccgtgcaggagcttgaccgcgaccgcggcacgcagggtaaccatgccttctacatgtcggtgccgccgcgcgcattcccacaggtcgccaagcagctggccgcctccggcctgtcgcgctcgtccgagggcgcatggcgccgcgtgatcatcgagaagccgttcggccatgatctggccagcgccaaggaactcgacagcgtggtatccgaagtgttcgacccgagctccgtgttccgcatcgaccactacctcggcaaggaaaccgtgcagaacctgctggccctgcgtttcgccaacgccatgtacgagccgatctggaacgccaactatgtggaccacgtgcagatcacgatggccgaggacatcggcatcggcggccgcgccggctattacgacggcatcggcgccgcacgcgacgtcatccagaaccacctgcttcagctcatggctctgaccgccatggaggagccggtgagcttcaccgccaaggacctgaccgccgaaaagaccaaggtgctttccgccgtgcgcctgcccaaggacctcgccgccaacaccgcgcgcggccagtacgccaagggctggcagggctcgcacgaagtggtcggctacttggaggaaaaaggcatcgaccccaagagcaccactgaaacgtacgccgccatccgcctcgatatcgacacccgccgctgggctggcgtgccgttctacctgcgttgcggcaagcgcctcggcaagcgtgtaaccgaaatcgccgtggtgttcaagcgcgccccgcatctgccgttcgagcagaccgccgtgcgcgaactcggcaagaacgccatcgtgattcgcgtgcagcccgacgagggcgtcaccatgcgcttcggagccaaggtgccgggcggctccaccatggaggtccgtgacgtgaacatggacttcagctacggccgctccttcaccgagaactcgccggaagcctatgagcgactgattctggacgtgctgctcggtgatccgccgttgttcccgaccaccgaagaggtgaacctcagctgggagatcctcgatccgattgaacaattctggtccacgcttggccagccgcaggcctaccgcgccggtacgtggggtccggcacaggccgacgaaatgctggcgcgcgacggccgccactggaggatgccatga

SEQ ID NO: 198 - protein, 555 aa, Bifidobacterium longum
MRTRLRTRLAQRTAQHTQCGPNRSPNRISPLAIDSRRRLPLYIMSESPNWSNPLRDSRDLRLPRIAGPCSLVIFGVTGDLAQKKLLPAVYDLANRGLLPPSFGLTGFARRDWTQERFIEFVKAAVQAHCRTPFKESTWRNLAAGIRFVQGTFDDPEAFERLSATVQELDRDRGTQGNHAFYMSVPPRAFPQVAKQLAASGLSRSSEGAWRRVIIEKPFGHDLASAKELDSVVSEVFDPSSVFRIDHYLGKETVQNLLALRFANAMYEPIWNANYVDHVQITMAEDIGIGGRAGYYDGIGAARDVIQNHLLQLMALTAMEEPVSFTAKDLTAEKTKVLSAVRLPKDLAANTARGQYAKGWQGSHEVVGYLEEKGIDPKSTTETYAAIRLDIDTRRWAGVPFYLRCGKRLGKRVTEIAVVFKRAPHLPFEQTAVRELGKNAIVIRVQPDEGVTMRFGAKVPGGSTMEVRDVNMDFSYGRSFTENSPEAYERLILDVLLGDPPLFPTTEEVNLSWEILDPIEQFWSTLGQPQAYRAGTWGPAQADEMLARDGRHWRMP

SEQ ID NO: 199 - DNA, 1284 bp, Rhodococcus opacus
  CDS (1)..(1284)
atgattgccggcgcacgcacttccttccggatcgacacatggaaccagctggcacgcaacttccgctatatacgaggcacatttgacgaccaatcggcctttgaggacctgaaacgcgtactagcacaattggatacgattcactccgccataggtcacgccttctacatgtcgatctccccggcgcacttttccctggtgtgcgctcagctgaactccgtgggtctcaaccaggatcgccacggataccggcgcatcgtgctggagaagccattcggcaacgacctggccagttcacgggagttgggcgccacggtggacgaggtgttcggggccggatcggtgttccgggtcgaccactatctcggcaaagagacggtccagaacatcctggcgctgcgattcgccaacgggctgttcgagccgctgtggaaccaccgccacatcgacaacatacagatcaccatggccgaggacatcggcgtcgaggggcgagccggctactacgacggtgtcggcgctgcccgagacgtcatacagaatcatttgctgcagttgttggccctcattgccatggaggagccagttggtgtcgacgcagcaagtctgtcggcggagaaggtgaaagttctctctgccacatcagcagtgagtccgctggccgacaccaccgcgcgtggtcagtactcggctaccgtccggggtgagacctacctgccggggctgctcgaggaggacggattcgatccttgctcgaccaccgagacgtacgcggccatcaccgtgcagatagcgaatcgccgctgggccggggttccgttctatctccgcgcgggtaagcgtctggccagaaggaccacggaagttgctgtgactttctcctcgccgcaccatttgaccggttccgccgaggccggcccacctccccagaatgtcttggtggtgcgagtgcagcccgacgacggaatctcgttgaggatcggagcgaagacacccggggaggggatgcgaatccaggatgtggatctgaacatgtcgttcgctgactcgttcggcgggtcctcacccgaggcctacgagcgcctgatcctcgatgtccttcgcggcgacgcctcactgttcccatcgcaggccgaggtcgacgcgtcgtgggcgattgtcgatccggtcatcgctttctgggccgagcagggccgccccgacacataccaatccggcagcgccggaccgagttcggccattcccgtcgtcactcgtacaggacgggcatggcggccgttgtga

SEQ ID NO: 200 - protein, 427 aa, Rhodococcus opacus
MIAGARTSFRIDTWNQLARNFRYIRGTFDDQSAFEDLKRVLAQLDTIHSAIGHAFYMSISPAHFSLVCAQLNSVGLNQDRHGYRRIVLEKPFGNDLASSRELGATVDEVFGAGSVFRVDHYLGKETVQNILALRFANGLFEPLWNHRHIDNIQITMAEDIGVEGRAGYYDGVGAARDVIQNHLLQLLALIAMEEPVGVDAASLSAEKVKVLSATSAVSPLADTTARGQYSATVRGETYLPGLLEEDGFDPCSTTETYAAITVQIANRRWAGVPFYLRAGKRLARRTTEVAVTFSSPHHLTGSAEAGPPPQNVLVVRVQPDDGISLRIGAKTPGEGMRIQDVDLNMSFADSFGGSSPEAYERLILDVLRGDASLFPSQAEVDASWAIVDPVIAFWAEQGRPDTYQSGSAGPSSAIPVVTRTGRAWRPL

SEQ ID NO: 201 - DNA, 2358 bp, Solanum tuberosum
  CDS (160)..(1905)
ctccacttggcggaagaaactaatgtttatttagcaaaggcgaaacaccctttcggagatctcaagagactaatcccaactccttttacgccataaccccccattcatatttcattcccctcacttctatcgaacccatcttctctgatttatcaagatatggtaaccctttattcttccccttccactaactgttctggggctttttcatcttactccaattcttctattggcttctacaattatcacaacaacttccctatttcatccagaaagtttggttctcacaagatttctttgcaaattaatgccattcgcatgcaagatggtgctgttgtggctcaacctagcaaaacccaagatgaaactcctttgaagaaattaaaagatggaattttgtcaaaggagcagaaacatacatttgattttgatagcaacaaagataaatcaactgtcagtattactgttgttggtgcttcaggagatcttgccaaaaaaaagatatttcctgcactttttgcactttattatgagggttgcttaccggagcatttcactatttttggttatgcccggagtaagatgactgatgatgaactcaggaacatggtcagcaagacacttacttgcaggattgataagagggaaaattgtggtgaaaagatggaacagtttctagaaaggtgtttctaccatagtggacaatatgattcccaagaaaactttgcagagcttgataaaaaactgaaagaacatgaggctggaaggttttccaatcgtctgttttacttgtccattccaccaaatatttttataaatgctgtacgatgtgcaagccttgcgtcatctgctcatggatggactagagtcattgtagagaaaccctttggtcgggattctgaatcctctgctgcattaacaggagcacttaagcagtacttgaaggaagatcaaattttcaggattgatcactatttagggaaggagcttgtggaaaacctttctgtccttcgtttctccaacttgatatttgaacccttatggtcaaggcagtatataaggaacgtgcaatttattttctctgaagattttggcactgaaggaaggggaggttattttgatcattatgggataattagagacattatgcaaaaccatttgcttcaaattcttgccctctttgccatggaaacacctgtcagtttggatgcagaagatatcaggaatgaaaaggtaaaagttctgcgttctatgagacctttacaactagatgatgttattgtcgggcagtacaaaagtcacacaaaagggggtgttaactatcctggttataccgacgacaagactgtacccaaggacagtctaaccccaacttttgctgcagctgctcttttcatagataatgcaagatgggatggtgtgcctttccttatgaaggctggaaaagctttacataccaggagtgcggaaataagagtacaattcaggcacgtgccaggaaacttatacaataagaactttggctcggatctagatcaggcaacaaacgagcttgttatccgtgttcaacctgacgaagctatatacctaaagatcaataacaaagttcccggtttaggaatgagattggatcgcagtaatcttaatctgctttactcagcaagatactcaaaggagatccctgatgcatatgagcggctacttcttgatgccatagaaggtgaacgtaggctttttatccgtagtgatgaactggatgctgcttggtctcttttcacaccagtgttgaaagaccttgagcataagaaaatagtaccggaaagctacccctatggaagtcgaggacctattggagcacattaccttgcagcacgatataaagtaagatggggtgatcttgcttagacaaagtaatttgctattgctatgagaaaccatatgtagccttacaagttcttctgcttagtatggtgcaaccaaatttgttgttgggattccagtatcaagactaacaaagcttgaagttgcttactgtcaaggcagatgacaatagagaacacaagttagtgaaacaaaagaagaggagaatctgggtttattttgttattcaaataaatcttttctattgcaccaatgcatatccagtggtagcatcttttttcatgtagcatttagtataccttgttagaatctaataattcgaaaagtcatcgtcttcttatcaagtattcatacatgcagctttctggttccgaactatattaaattttattgcatgaaatgtactatgaaatagaaggtttgttgccttcaatatttcttcaaaaaaaaaaaaaaaaaaaaaaaaaaaaaaaaaaa

SEQ ID NO: 202 - protein, 581 aa, Solanum tuberosum
MVTLYSSPSTNCSGAFSSYSNSSIGFYNYHNNFPISSRKFGSHKISLQINAIRMQDGAVVAQPSKTQDETPLKKLKDGILSKEQKHTFDFDSNKDKSTVSITVVGASGDLAKKKIFPALFALYYEGCLPEHFTIFGYARSKMTDDELRNMVSKTLTCRIDKRENCGEKMEQFLERCFYHSGQYDSQENFAELDKKLKEHEAGRFSNRLFYLSIPPNIFINAVRCASLASSAHGWTRVIVEKPFGRDSESSAALTGALKQYLKEDQIFRIDHYLGKELVENLSVLRFSNLIFEPLWSRQYIRNVQFIFSEDFGTEGRGGYFDHYGIIRDIMQNHLLQILALFAMETPVSLDAEDIRNEKVKVLRSMRPLQLDDVIVGQYKSHTKGGVNYPGYTDDKTVPKDSLTPTFAAAALFIDNARWDGVPFLMKAGKALHTRSAEIRVQFRHVPGNLYNKNFGSDLDQATNELVIRVQPDEAIYLKINNKVPGLGMRLDRSNLNLLYSARYSKEIPDAYERLLLDAIEGERRLFIRSDELDAAWSLFTPVLKDLEHKKIVPESYPYGSRGPIGAHYLAARYKVRWGDLA

SEQ ID NO: 203 - DNA, 2879 bp, Leishmania guyanensis
  CDS (205)..(1893)
  Misc_Feature (1992)..(2321): n at positions 1992-2321 can be any nucleic acid
  Misc_Feature (2700)..(2840): n at positions 2700 and 2840 can be any nucleic acid
cgctatataagtatcagtttctgtactttattgcaacgcagcagaaagcgaataacaacagcaagaacacacaaaaacgcacgacttgagagataaaagtcggttatcctattcgggtcctcctatacaaccgtcttaatggtgttttaggtttgactctgggcaccctacattgatcactggtacatgcattaagtactcgccatgtcgtcggagcattccagtgctgatcagaattcctatgaggctgacgtgtgctgcattctggacgagctccgcgcacaggtgctggcgcagaagccggacaacgtgttgcagttcatctccaagtcagcgcttaatcttcagaaacagcgccagatggaagcgtgtgatcaaatcaccttcaaggtgaaggatgagcagaagaaccgtgcgttgaccatcattgtgatcggcgccagcggcgatctggccaagaagaagacattcccggccctctttcagctctactgcgacggattcctccccccggaagtcaacattgtcggctatgctcgcaccaaggtggatgatgtcgagaagtggaagcgtgagacgctcatgaagtactttttgaacctgtcggcgcttcgatgtcacgccgaagacttcttgaaacacattagctacttctcgggagcgtacgacaacgtggacgacttcaagcgtctcgacaagatgatccgcgagaaggaggatgctttcaagggccctgagaagggtggcgaccgtctcttttaccttgctctccccccatcagtgtttgcatgcgtctgtgggagcattcgcaagggtgccatgccgcaggaggtaggaggatgggtgcggctgatcatagagaagccctttggccacgacaccaacagttccgccgagctgtcccacgcgctggagccgttcttcgacgagtcgcagctgtaccgcattgaccactatctcgggaaggagatggtacagaacatcatcacgacacgcttcgccaaccgcatcttcagctctttgtggaactcgagcaatatcgcttgcgtgcagatcacgttcaaggagacgatcggcaccgagggccgtggcggctacttcgatagcattggcattattcgtgacgtcatgcaaaaccatctcacccagattcttgccctgctagccatggagaagccraagtcactcgaagccgagtgcatccgcgacgagaaggtgtcgttgctgaagtgtgttgagcccgtcaccaaggagaattgcgtgctgggccagtacactgcctccgccgacggttccatcccaggttacctggaggacgagaccgtacccaagggcagtacttgccccacgtttgccgtggtgcggctcaacatcaacaacgaccgctggtcgggagtcccttttattctcaaggctggcaaggccgtggagcagaagtacgtggcgattcgcgttcagttccacgatgaggttcacccgtacggcgatgcaacaaagcgtaacgagcttgtcattcgtgcccagccgtccgaggccatgtatgtcaagattaccacaaaagttcccggtcatagtgaggacttgcggcacacgcaccagacagaattggatctcacctaccactcccggtacagtgtgcgtctcccagacgcttacgagagcctcatcaacgacgcactgctgggcaactccacaaactttgtgcgaagggacgaactcgatgtggcgtggcgcatcttcacaccgctcttgcaccagatcgatcgtggcgaagtcgctccgattccgtaccaagccggcactcgcggacccaaggaagcggatgactttatcatcaacaacggcttcaagaaggaagaggactatcactgggctccctcgaacaagctgtaagaaaggtcaacattgcagtttgtttcacaagccccctttcgacgacagcgaagagaggcaagtggcttatatactgggaagcttgcctatccttccttnnnnnnnnnnnnnnnnnnnnnnnnnnnnnnnnnnnnnnnnnnnnnnnnnnnnnnnnnnnnnnnnnnnnnnnnnnnnnnnnnnnnnnnnnnnnnnnnnnnnnnnnnnnnnnnnnnnnnnnnnnnnnnnnnnnnnnnnnnnnnnnnnnnnnnnnnnnnnnnnnnnnnnnnnnnnnnnnnnnnnnnnnnnnnnnnnnnnnnnnnnnnnnnnnnnnnnnnnnnnnnnnnnnnnnnnnnnnnnnnnnnnnnnnnnnnnnnnnnnnnnnnnnnnnnnnnnnnnnnnnnnnnnnnnnnnnnnnnnnnnnnnnnnnnnnnnnnnnnnnnnnnnnnnnncatggatgagagagtttgctgtaggcagagtgcgcggatcctcaacacgaaggcacgcgcatagagtcgatacgttaccgaattttctttcgtttcttccactccccctttgctgtttgctatgatcagcctggctttcttctctcttgcgtccgcatttgtgtgccgcttttgctgttttttcgtttcggagtctcttcttgccgccgcaccccacacgcgccactgtggcgttccgctccttcctcctccaccttcccagatgactctccctctatctctccgtctataaaccagacctttttcctcttcccttttttctattattgccacttggatatatacacttacacgtaccgtgcgcgcgatgtagcgatgngttcagtcgtctgacagcgatcgagaccagaatacatgaaacacgagatagataggcttccttttaagcagcagggatacatacgctgatcggagttacatgcaagccccgacgacaattcgaaaatgatgtgctcttgnaacagaaagaaaccaaaaaaaaaaaaaaaaaaaaaaaaa

SEQ ID NO: 204 - protein, 562 aa, Leishmania guyanensis
MSSEHSSADQNSYEADVCCILDELRAQVLAQKPDNVLQFISKSALNLQKQRQMEACDQITFKVKDEQKNRALTIIVIGASGDLAKKKTFPALFQLYCDGFLPPEVNIVGYARTKVDDVEKWKRETLMKYFLNLSALRCHAEDFLKHISYFSGAYDNVDDFKRLDKMIREKEDAFKGPEKGGDRLFYLALPPSVFACVCGSIRKGAMPQEVGGWVRLIIEKPFGHDTNSSAELSHALEPFFDESQLYRIDHYLGKEMVQNIITTRFANRIFSSLWNSSNIACVQITFKETIGTEGRGGYFDSIGIIRDVMQNHLTQILALLAMEKPKSLEAECIRDEKVSLLKCVEPVTKENCVLGQYTASADGSIPGYLEDETVPKGSTCPTFAVVRLNINNDRWSGVPFILKAGKAVEQKYVAIRVQFHDEVHPYGDATKRNELVIRAQPSEAMYVKITTKVPGHSEDLRHTHQTELDLTYHSRYSVRLPDAYESLINDALLGNSTNFVRRDELDVAWRIFTPLLHQIDRGEVAPIPYQAGTRGPKEADDFIINNGFKKEEDYHWAPSNKL

SEQ ID NO: 205 - DNA, 2916 bp, Leishmania amazonensis
  CDS (207)..(1895)
  Misc_Feature (1577)..(1647): y at positions 1577, 1594, and 1647 is t or c
  Misc_Feature (2191)..(2311): n at positions 1992-2321 can be any nucleic acid
cgctatataagtatcagtttctgtactttattgcgacgtaggataaagcgaagagcagcaaaacgtactgaaaagagcggaggactctccgagcaatagaatttgctcatcttattcacccacccttatacaaccgttttgatcttatttcttgttgcctccggctaccatatattgatcggtgttatacaaattaagtaagcaccatgtcggaagcgcaggctcgtgctgatgaggatgcttacatggccgacgtcgacagcattctggacgtgctccggacgcatgtgctggaacggaagccagatgacgttttccagttcctttccaagtcggcgctaagtctgcagaaggacagcggcgccgaattgtgcgatcgcatcaactgtaaggtaaaggatgaacagaagagccgtgcattgtctatcatcgtattcggtgccagcggggatctggctaagaagaagacatttcctgccctcttcgatctgtactgtggcgggctccttcccccggaggtcaacattatcggctatgctcgcaccaaggtggacgatgtcgagaagtggaagcatgagacgctcatgaagtatttttcgaaagtgtcggagcgggaatgccacgccgaggacttcttgaaacacatcagctacttttgtggagcgtacgacaaggtggacgacttcaagcgtcttgacgcggtgattcgagagaaggaaaatgcctttaagggccctgaggagggtggaaaccgtctcttctatcttgctcttccgccctcagtgttcgcaattgtctgcgagcacattcacaagggggcgatgccgcaggaagtggggggatgggtgcgggtgatcatcgagaagccctttggccgcgataccaagagctccgccgagctgtcccaagcgctggagccgttcttcgacgagtcgcagctgtaccgcattgaccaytacctcgggaaggagatggtgcagaacatcatcacgacacgcttcgccaaccgtatcttcagcgctgtgtggaactcgagcaacattgcgtgcgtgcaaatcacgttcaaggagaccatcggyaccgagggccgcggcggctacttcgacaacattggcattattcgcgacgtcatgcaaaaccacctcacccagattcttgccctgctggccatggagaagccgcggtcgctggacgctgagtgcatccgcgacgagaaggtgtcggtgctgaagtgcattgagccagtaactaaggagaattgtgttctgggccagtacactgcctccgccgatggctccatgcctggttacctacaggatgagaccgtaccccggggcagcacttgccccacatttgccgtgatgcggctcaacatcaacaacgaccgctgggccggcgtcccttttattctcaaggctggcaaggctgtggagcagaagtacgtggcgattcgcattcagttcaaggacgaggtccacccctacggcgatgcgacacagcgcaacgagctcgtcatccgcgctcagccgtccgaggccatgtatgtcaagatcaccacaaaagttcctggccttagyggagacttacggcagaygcaccagacagagctggaccttacctaccacacccggtacgatgtgcgccttycagacgcctacgagagcctcatcaacgacgcactgctgggtaactcgacaaactttgtgcgtaaggacgagctcgatgtggcatggcgcatcttcacaccgctcctgcaccagatcgacaatggagagatccaaccgattccgtaccaggcaggcacgcgcgggcccaaggaagcggatgaattcatcatcaacaacggcttcaagcaccagaaagactaccagtggactccctcgaacaagctgtgatgaaggcagacattgcaatctatttcacagctccctgtcgacggcagcgagagaggcagggtattatacactggatgcgtgcctatccgcccctaagaaagcacgtggtcgcgctctgcggtacccaccgaccaacgctgcagatacaacacgtgccaattggcatcccgtacctctactgtctacaatccttttttttcgttctcccttgctatcgccattccccatgcgtgtgcactgcggcccagacagctagaggatgtgtgagcccgtgccgccgtacagacagtgccttnnnnnnnnnnnnnnnnnnnnnnnnnnnnnnnnnnnnnnnnnnnnnnnnnnnnnnnnnnnnnnnnnnnnnnnnnnnnnnnnnnnnnnnnnnnnnnnnnnnnnnnnnnnnnnnnnnnnnnnnnatgagggatagatctctggaatcttaggagaacgcgcggcacccaacacggaggcgcgcacttgatgcaaatgctgctctcgcgtttgttttccctttgccttatttttgttgtttgctttggtcggcctgttgttttcctctctcgcgcagctacctttgtatgcagatttttcattgcttgtgtcgttgctggagttgccttttgccgccgttcccccaccaccttttcagaacacacacacacacaccgcccctcgggcatttcgctcccttttcctacccccttttggccgttttcctttccaatttccgggcataaattacattcttgggttccttttttgttgtcatagtcccttgagggtgcattcccatgttccgcgagcgtggggcaacgacgtgccccagcgtccggaaaggatcgagaaaaggcccccgaaagggtcaaaaacgaagggtggccttcattcaagcagcagcgattcagatgtgtgtgggagtggcagccctttccgagtggcttcccaaacatggcatgtgctcgaaagggagccaacgagaaaaaaaaaaaaaaaaaaaaaaaaaaaaaaaaaaaaaaaaaaa

SEQ ID NO: 206 - protein, 562 aa, Leishmania amazonensis
  Variant (463)..(463): Xaa in position 463 is Met or Thr
  Variant (481)..(481): Xaa in position 481 is Ser or Pro
MSEAQARADEDAYMADVDSILDVLRTHVLERKPDDVFQFLSKSALSLQKDSGAELCDRINCKVKDEQKSRALSIIVFGASGDLAKKKTFPALFDLYCGGLLPPEVNIIGYARTKVDDVEKWKHETLMKYFSKVSERECHAEDFLKHISYFCGAYDKVDDFKRLDAVIREKENAFKGPEEGGNRLFYLALPPSVFAIVCEHIHKGAMPQEVGGWVRVIIEKPFGRDTKSSAELSQALEPFFDESQLYRIDHYLGKEMVQNIITTRFANRIFSAVWNSSNIACVQITFKETIGTEGRGGYFDNIGIIRDVMQNHLTQILALLAMEKPRSLDAECIRDEKVSVLKCIEPVTKENCVLGQYTASADGSMPGYLQDETVPRGSTCPTFAVMRLNINNDRWAGVPFILKAGKAVEQKYVAIRIQFKDEVHPYGDATQRNELVIRAQPSEAMYVKITTKVPGLSGDLRQXHQTELDLTYHTRYDVRLXDAYESLINDALLGNSTNFVRKDELDVAWRIFTPLLHQIDNGEIQPIPYQAGTRGPKEADEFIINNGFKHQKDYQWTPSNKL

SEQ ID NO: 207 - DNA, 1440 bp, Chlorobium tepidum
  CDS (1)..(1440)
atgagcggcactctcgacaacttcaccatcgtcatcttcggcgcgagcagcgacctggcttcgcgcaagctttttccgtcgattttccagctcgcgcggtgggggcacatgcctgagagcttccggctgattggcgtcgggcggcaggagcaaagccacgaggagttccgcgcgttcgtccgcagtcgcctgctggagcactcgcccgaagccgccggtgacgccgcgcggctcgacgccttctgcctccgcctcttttatgcccgcgtcgatctggacgatccggcgagctacgaagtgctgcgcgacgagatcatgcgcgaggaaaaagtgggagggagcacttgccgcaacctgatgttctatctgtcgataccgccgagccttgcgcctgccgtggtgcgcaatctcggcaaggccgggctgggtggacgtgaacagtcgtgcaccgggtggcgcaagctcatcgccgaaaagccctacggccacgatctcgaaagcgcccgcgagctgaaccgcgttatcaacgaggtgttcgaggagaaccaggtctatcgcatcgaccactacctcggcaaggagccggtgcagaacatcatggtgttccgcttctcgaacggtattttcgagccgctctggaaccggcagtatatcgcgcaggtgcagatcaccatcgccgaggatttcggcatccgggatcgcggcgcgtactacgaggagtcgggacttttgcgtgacatcatccagaaccacggcttgcagttgctcacggccatcgcgatggagccgccggtcgatctcagcgccgattcgatccgcgacgagaaagcgaaagttctgcgttcggtgcggcacttcactcctgattcggttcgggagtcggtggtgatcggccaatacgaggggtaccgcaacgagaaaaatgtcgcgccggactcgaaagtcgagaccttcgctgccgtgaagtttcacgtggataactggcgttggtcgggtgtgccgttctacatgaaagcgggcaagaatctcgccaagcgcgtgaccgaaatcgtcatcaccttccgctgcccgccgcagaattattacggcccatccggcggggcggcgtgctgtacgccgaaccaggtggtactcggcatccagcccgacgaaacggttgccatccgctttggcgccaagcgccccggcgagcagatgattaccgatccggtgttcatgaagttcgactaccgcgatacttttcagggcgaaggtcttacgccgtaccaccgcctcctgctcgatgccatcgagggcaaccagatgaacttcatccgcaaagacagcgtggagtactcgtgggaaattatcgacagcctgaaaaattcaatcgacggccaggttccggagcaatatccagttcatagctgggggccggaatcgtcgaggatttacgggtga

SEQ ID NO: 208 - protein, 479 aa, Chlorobium tepidum
MSGTLDNFTIVIFGASSDLASRKLFPSIFQLARWGHMPESFRLIGVGRQEQSHEEFRAFVRSRLLEHSPEAAGDAARLDAFCLRLFYARVDLDDPASYEVLRDEIMREEKVGGSTCRNLMFYLSIPPSLAPAVVRNLGKAGLGGREQSCTGWRKLIAEKPYGHDLESARELNRVINEVFEENQVYRIDHYLGKEPVQNIMVFRFSNGIFEPLWNRQYIAQVQITIAEDFGIRDRGAYYEESGLLRDIIQNHGLQLLTAIAMEPPVDLSADSIRDEKAKVLRSVRHFTPDSVRESVVIGQYEGYRNEKNVAPDSKVETFAAVKFHVDNWRWSGVPFYMKAGKNLAKRVTEIVITFRCPPQNYYGPSGGAACCTPNQVVLGIQPDETVAIRFGAKRPGEQMITDPVFMKFDYRDTFQGEGLTPYHRLLLDAIEGNQMNFIRKDSVEYSWEIIDSLKNSIDGQVPEQYPVHSWGPESSRIYG

SEQ ID NO: 209 - DNA, 2187 bp, Methylobacterium extorquens
  CDS (640)..(2187)
gtgggggctggagcgcggctactgcatgatgatcggcggcgagaaggccgtggtggatcgcctcgatcccatcttcgcggccctcgcgccgggccgcggcgagattccccccacccccggccgagcggggcgggacccgcgggccgagcagggctatatccacgccggcccgagcggggcgggccacttcgtcaagatggtccacaacggcatcgagtacggcctcatgcaggcctacgccgaaggtttcgagatcctgaagcacgcggactcggccgagctgccgcaggagcagcggttcgacctcgacctcgcggacgtggccgaggtctggcggcggggcagcgtcgtgtcgtcctggctcctcgacctcaccgcgatggcgctggccaacgatccgaagctcgactcgttcgcaggctacgtcgaggattcgggcgagggccgctggaccatcaatgcggccgtcgaggaggcggtgccggcgatcgttctctcggcggcgctctacgcccggttccgctcgcgccaggaggcgagcttcgccgacaagatgctgtcagcgatgcgcaagggcttcggcggccaccaggagcccaagaagagctgaacgtgacgttcgccacgcgggagccgcgcatgatccacccgaacaccgcccccaaggcgggcgccgcgaaaccggcgccggactgcacgcttgtcatcttcggcgtcaccggcgacctgacgcaccggctcttgatgccggcgctctacaacctcgcgcggtggaagctcctgcccgaacggttcgccatcgtcggcgttggccgcagcgagatgggcaccgacgggctgcgccacgacctcaccaggaccatgcagggcttcgtcgccgagaggggcggcgagttctcagccgacagcctcgaccgggaggcctggaaccgggtcgtcggccggctggactatctcgccggcgatgtcgaagacccggcgacttacgaagagctgtcgcggcgcatcggggtctcgcgagatgcccaggccgccggcggcaacgtgctgttctaccttgcggtcgcggcccgcctcttcggtccggtggtgacgcgactcggcgaagcggggctcacccgagaaggggagggcgcctggcggcgggtgatcatcgaaaaacccttcggccacgatctcgcctcggccaaggcgctcaaccgggaggtcctcgcggccctaagcgaggaccagatcttccggatcgaccacttcctcggcaaggagaccgtccagaacatcatggtcttccggttcggcaacggcctgttcgagccgttgtggaaccgcgaccgcatcgaccacgtccagatcacggtcgctgagacggttggggtcgagaagcgcggctcgttctacgacgcgaccggcgccctccgcgacatggtgccgaaccacctcttccagctcttcaccatgacggccatggagccgccgatctccttcgacgcccacgccgtgcgcgacaagaaggaggaggtgctcatggccgtgcaccagctctccgaggacgcggccgtgcgcgaggcggtgcgcgggcgatacacggcaggcgcggtgcgcggccagcccgtccgcagctaccgcgacgagccggacgtggacccggcctcgcagaccgagacctacgtcgcgctgcgcctcatggtcgacaactggcgctgggccggcgtgccgttctacctccgcacgggcaaggcgatgacgaggcgcgacacggagatcgccatccagttcaagcaggcgccgctggcgctgttccgcggcaccgccgtcgaggcctgcatcccgaactggctcgtgctgcagatccagccggacgagggcatctccctgcagttcggcgccaaggtgccgggcaccgaggtgcggctcggcgccgtcaacatggacttcctctacaaggactacttccagacccagccgagcaccggctacgagacgctcatctacgacgccatgatcggcgacgcgacgctgttccagcgcgccgacaatatcgaggccggctggcgggccgtgcagcccgtgctcgacgcctggtcgagcgggcgcgccccgatggccgcctacccggccggcagcgcaggcccgaaggaggcggacgacctcctcgcccgcgacggtcgcgcctggcgccctctgtga

SEQ ID NO: 210 - protein, 515 aa, Methylobacterium extorquens
MIHPNTAPKAGAAKPAPDCTLVIFGVTGDLTHRLLMPALYNLARWKLLPERFAIVGVGRSEMGTDGLRHDLTRTMQGFVAERGGEFSADSLDREAWNRVVGRLDYLAGDVEDPATYEELSRRIGVSRDAQAAGGNVLFYLAVAARLFGPVVTRLGEAGLTREGEGAWRRVIIEKPFGHDLASAKALNREVLAALSEDQIFRIDHFLGKETVQNIMVFRFGNGLFEPLWNRDRIDHVQITVAETVGVEKRGSFYDATGALRDMVPNHLFQLFTMTAMEPPISFDAHAVRDKKEEVLMAVHQLSEDAAVREAVRGRYTAGAVRGQPVRSYRDEPDVDPASQTETYVALRLMVDNWRWAGVPFYLRTGKAMTRRDTEIAIQFKQAPLALFRGTAVEACIPNWLVLQIQPDEGISLQFGAKVPGTEVRLGAVNMDFLYKDYFQTQPSTGYETLIYDAMIGDATLFQRADNIEAGWRAVQPVLDAWSSGRAPMAAYPAGSAGPKEADDLLARDGRAWRPL

SEQ ID NO: 211 - DNA, 1476 bp, Bartonella henselae
  CDS (1)..(1476)
atggtgagtaaaattattccagtctctccctttgactgtattgtgtttggtggcaatggtgatttagcagcacgcaaacttatacctgctttataccattgtcagtgtgttgggcaattgagcgagccaacacgtattattggagtttcgcgctcttctttgagtggtgaagagtatcaaaattttgttcgtgcttctttagaaaaatatgttcatccaaaagatctcaatcgaattgaactcaatcgttttcttgcgcgtttaacctatatttctgttgatattacatcaaatcgagggtggagagatctcgctttaccgctctcagaagatccatctgatattcgagttttttatttagcagttggttcatccctttttggtgatattgcgatgagattgggacaaaatggtttagtaacgcaaaaaacacgaattattattgaaaaacctattggttgtaatgtaaaaacagcggttcagctcaatgatacatttgcaagcgtatttgatgaagatcagatttttcgcattgaccattatctgggcaaggagaccgttcaaaatttgatggcattgcggtttgttaatacactttatgagccgttatggaactccaattatattgatcatgtacagataacggtggctgaatctttaggattggaagggcgtatagaatattatgagagtgcaggtgcactgcgtgatatggtacaaaatcatatgctgcaattgctctgtttggttgctatggaagtaccatttaccaatagtgcgaatgctgtgcgtgatgaaaaactgaaagttttgcattctttaatgcctctcgatgttcgtaatgtagagcaatatactgtacgtgggcagtatctttctggtatattggatgatgtttgtgtaaaatcttatcttgatgatttggggaaagaagttagtaggagcgaaacatttgtggcgcttaaaattaaggttgataattggcggtgggcagatacgcctttttatttgcgaacaggtaaacgcatgtccacgcggatgtctgaaattgttatcgttttcaaacccattccccataatatttttgagacggattcaaatgaaattttttctaatcggctcgtcattcgtctccagcctgatgaaggcgtaaaacaatggttgatgattaaggatccaggtcctggtggtatacgatttcgtcatattccattggatatgagttttgcgtctacattttctcagcgtaatcctgatgcttatgaacgcttattaatggatgttattcgcggagatcaaacactctttatgcgtcgtgatgaagttgaagctgcttggcgttggattgatccaattctagagggatgggaagccataaagcagcctgttcatggttatagcgctggctcatggggaccatctgcttcgaaacttttgatggaacgtgatgggcgtatatggaacaatttggtttag

SEQ ID NO: 212 - protein, 491 aa, Bartonella henselae
MVSKIIPVSPFDCIVFGGNGDLAARKLIPALYHCQCVGQLSEPTRIIGVSRSSLSGEEYQNFVRASLEKYVHPKDLNRIELNRFLARLTYISVDITSNRGWRDLALPLSEDPSDIRVFYLAVGSSLFGDIAMRLGQNGLVTQKTRIIIEKPIGCNVKTAVQLNDTFASVFDEDQIFRIDHYLGKETVQNLMALRFVNTLYEPLWNSNYIDHVQITVAESLGLEGRIEYYESAGALRDMVQNHMLQLLCLVAMEVPFTNSANAVRDEKLKVLHSLMPLDVRNVEQYTVRGQYLSGILDDVCVKSYLDDLGKEVSRSETFVALKIKVDNWRWADTPFYLRTGKRMSTRMSEIVIVFKPIPHNIFETDSNEIFSNRLVIRLQPDEGVKQWLMIKDPGPGGIRFRHIPLDMSFASTFSQRNPDAYERLLMDVIRGDQTLFMRRDEVEAAWRWIDPILEGWEAIKQPVHGYSAGSWGPSASKLLMERDGRIWNNLV

SEQ ID NO: 213 - DNA, 2266 bp, Toxoplasma gondii
  CDS (169)..(1851)
ccccctcctggcatcttgcgtcgcatagcagacatacatcgtggggttttggcccgctaggttaccatcacgctcaacggcttccagttgaggaaccgtgttttccccacattttcatgattttgtccaaaagttgcagagtcgacttccatctctggataaggcaacatggcaccggaaaatggtagaagcagttattctgcatatatcagactgttgtggcttctgacggcggtaactgctgcgtcggccctcgtcacgaacgtctcgggggggacggcaggcgaagatcaaacttatggatatgtgaatgtcggaaacaactctgatggtgtcacgttcattttttacggcgcaaccggagatctctgcaggaggaaaatttacccgacggtcttccaactatatttggagaaaaagctgccggagtcgtttctcattgtaggcatgagcaatcaagccatgagcttggtcgacttccgtaagatgcatcgtcctcagctcgagaatgtcttgcgttcttataagcggctacgtgatcctgcgaggctactgaatcagtttgagcagcggatgagctacaccacgggatcgatcgacgatgataatattttaagtcatttctgccacaatatatcgagaatggaacaggcacaatcccctaacgcttcttggggccgagtactgtacttggcgctgcctcctcatattttcgctccggcggcggccggcttcaagcggaattgctcgacacataacgggtggacgcgagtagtagttgaaaaaccatttggacgtgattatgagagctcagagcttctttcggagcagctgaggagcgtgctgcttgaagaggaaacataccgaatagatcactatctcggcaaggagatgttacaggcactgccaccgctgcgattcacgaacttcttcctcgagccgctcatgaaccgaaatttcgtgaaagcactcacgatttctttcaacgaggatattggtatcagcggccgcggcgagttctttaatgcatacgggatcattcgggacgtcatgcagaatcacctcctccaacttctaactctcgtggtgatggaaagaccagccactttgagtgatgaggatatcagagacgagaaggttaaggttctgaaacagatcgctcccattaaactagaggagaccattgtcggtcagtactcaaagtcggaggatggaagcgctggatcgtatctggagaccgatggagtgccctcgcactctcgaacgcccacttacgccgcggtatgtatgcacatacgaagtcctcggtgggaaggagttcccatttacatggaggctggtaaaggcatgggcaagaggatcgtctacgtccgcatagactttgctggcgtcccgggattcagagagagtaactatgacttcccaggaaatagtttgattttagaagtccagccgcacccgtctgtgcgctttgaagtcaatgccagggcacctggactcggagcgactttgggaaggaacgtcttgaaaatggatgtcaatccggacggcgtgcggatccccgatgcatacgaaaatcttctcctcaacgtgctcagcggcgacaaaagccattttgttagaacggatgagctccgcgaatcatggagaattttcacgccgatgttacatgcattagaagatttacaggtccagccacgactgtatcctttcgggacacctggtcctagtggcgctgttgatgagctgcgcgcagctgtcgctgcctcagtgaacggtacgcaaggcaaatctacgatagatagcagagtctctctgcgtttttctgccagcacagggaaacagaggtaatgctcgtcgtattcgcttaagcacaaagcaggcgccaggggatcacttgtgctatagcgtgaggagtttctgttttggtagggcgtgtgattttggtaaattatagtaacgttggtaactagtggagctatcagtgaaagcgtagacttgcatctcttgacgcttcatgcatgtgttgtaagaagtcgacgtccgaaatagccgcaggtttccctttgtcagacagcgacggttaggccgtaactgcggctgaagatgctctttaattcagtaatgcagacagggacagtaacatacacattcgtttcacccgtggaggcggaaagctcctggcacgtgtttcgtaactggatgaacgttttttataccacagcagtcataagacattggccgctaaaaaaaaaaaaaaaaaaaa

SEQ ID NO: 214 - protein, 560 aa, Toxoplasma gondii
MAPENGRSSYSAYIRLLWLLTAVTAASALVTNVSGGTAGEDQTYGYVNVGNNSDGVTFIFYGATGDLCRRKIYPTVFQLYLEKKLPESFLIVGMSNQAMSLVDFRKMHRPQLENVLRSYKRLRDPARLLNQFEQRMSYTTGSIDDDNILSHFCHNISRMEQAQSPNASWGRVLYLALPPHIFAPAAAGFKRNCSTHNGWTRVVVEKPFGRDYESSELLSEQLRSVLLEEETYRIDHYLGKEMLQALPPLRFTNFFLEPLMNRNFVKALTISFNEDIGISGRGEFFNAYGIIRDVMQNHLLQLLTLVVMERPATLSDEDIRDEKVKVLKQIAPIKLEETIVGQYSKSEDGSAGSYLETDGVPSHSRTPTYAAVCMHIRSPRWEGVPIYMEAGKGMGKRIVYVRIDFAGVPGFRESNYDFPGNSLILEVQPHPSVRFEVNARAPGLGATLGRNVLKMDVNPDGVRIPDAYENLLLNVLSGDKSHFVRTDELRESWRIFTPMLHALEDLQVQPRLYPFGTPGPSGAVDELRAAVAASVNGTQGKSTIDSRVSLRFSASTGKQR

SEQ ID NO: 215 - DNA, 1455 bp, Corynebacterium glutamicum
  CDS (1)..(1455)
atggtgatcttcggtgtcactggcgacttggctcgaaagaagctgctccccgccatttatgatctagcaaaccgcggattgctgcccccaggattctcgttggtaggttacggccgccgcgaatggtccaaagaagactttgaaaaatacgtacgcgatgccgcaagtgctggtgctcgtacggaattccgtgaaaatgtttgggagcgcctcgccgagggtatggaatttgttcgcggcaactttgatgatgatgcagctttcgacaacctcgctgcaacactcaagcgcatcgacaaaacccgcggcaccgccggcaactgggcttactacctgtccattccaccagattccttcacagcggtctgccaccagctggagcgttccggcatggctgaatccaccgaagaagcatggcgccgcgtgatcatcgagaagcctttcggccacaacctcgaatccgcacacgagctcaaccagctggtcaacgcagtcttcccagaatcttctgtgttccgcatcgaccactatttgggcaaggaaacagttcaaaacatcctggctctgcgttttgctaaccagctgtttgagccactgtggaactccaactacgttgaccacgtccagatcaccatggctgaagatattggcttgggtggacgtgctggttactacgacggcatcggcgcagcccgcgacgtcatccagaaccacctgatccagctcttggctctggttgccatggaagaaccaatttctttcgtgccagcgcagctgcaggcagaaaagatcaaggtgctctctgcgacaaagccgtgctacccattggataaaacctccgctcgtggtcagtacgctgccggttggcagggctctgagttagtcaagggacttcgcgaagaagatggcttcaaccctgagtccaccactgagacttttgcggcttgtaccttagagatcacgtctcgtcgctgggctggtgtgccgttctacctgcgcaccggtaagcgtcttggtcgccgtgttactgagattgccgtggtgtttaaagacgcaccacaccagcctttcgacggcgacatgactgtatcccttggccaaaacgccatcgtgattcgcgtgcagcctgatgaaggtgtgctcatccgcttcggttccaaggttccaggttctgccatggaagtccgtgacgtcaacatggacttctcctactcagaatccttcactgaagaatcacctgaagcatacgagcgcctcattttggatgcgctgttagatgaatccagcctcttccctaccaacgaggaagtggaactgagctggaagattctggatccaattcttgaagcatgggatgccgatggagaaccagaggattacccagcgggtacgtggggtccaaagagcgctgatgaaatgctttcccgcaacggtcacacctggcgcaggccatga

SEQ ID NO: 216 - protein, 484 aa, Corynebacterium glutamicum
MVIFGVTGDLARKKLLPAIYDLANRGLLPPGFSLVGYGRREWSKEDFEKYVRDAASAGARTEFRENVWERLAEGMEFVRGNFDDDAAFDNLAATLKRIDKTRGTAGNWAYYLSIPPDSFTAVCHQLERSGMAESTEEAWRRVIIEKPFGHNLESAHELNQLVNAVFPESSVFRIDHYLGKETVQNILALRFANQLFEPLWNSNYVDHVQITMAEDIGLGGRAGYYDGIGAARDVIQNHLIQLLALVAMEEPISFVPAQLQAEKIKVLSATKPCYPLDKTSARGQYAAGWQGSELVKGLREEDGFNPESTTETFAACTLEITSRRWAGVPFYLRTGKRLGRRVTEIAVVFKDAPHQPFDGDMTVSLGQNAIVIRVQPDEGVLIRFGSKVPGSAMEVRDVNMDFSYSESFTEESPEAYERLILDALLDESSLFPTNEEVELSWKILDPILEAWDADGEPEDYPAGTWGPKSADEMLSRNGHTWRRP

SEQ ID NO: 217 - DNA, 1923 bp, Xanthomonas campestris
  CDS (1)..(1923)
atgcaacgacgtgggcctgctcgccgaagagtacgacccgcgcagcaaacgcatgcttggcaacttcccgcaagggtattcccacgtggccctggtcaatgcggcattgcgcctgcatggacgcatgggcgagaaggagacgcatccatgagtgagcaagtgaccaccccgccgtgcatcatcgtggtgttcggtgcgcgcggtgacctgacccggcgcctggtgatgccggcgctgtacaacctgcgccgcgccggtgcacttggcgaggaattcgccattgtcggcatggaccacggcgacatcaccgagcgtgcctggcgcaccaacatgggcaaggcgatgaccgagctgctgagcagccgcgatgccgagttccaggccgatggattcgataccgacacctgggactggttgcgcgagcgcatgcattacgtgcgcggcgacttcaccgacctgcgtgcctatcagtcgctggacggcgtgctggaaaaactgcacaagcgctatggcacccgcggtaatgtgctgttctatctggccaccgccgcgcgcttcttcgagccggtgctgctgaatctgggcgaggccgggctggtcaagcagcgcgagggcgccggctggcgccgggtgatcgtggaaaagccgttcggccacgacctgcccagcgccaagcatctcaatgccacggttgcgcgcgtgctgcacgaagaccaggtgttccgcatcgaccatttcctgggcaaggaaaccgtgcagaacatcctggcgttccgcttcgccaatggcctgttcgagccggtgtggaaccgcgaccggatcgaccacgtgcagatcactgccgccgaaaccatcggtgtggaagggcgcgggcgtttctacgatcccaccggctgcctgcgcgacatggtgcccaaccatctgttccagctgctggcgatgattgcgatggagccgccggccgcgttcaccaccgaggcgatgcatcgccgccgcgccgaagtgatcgaagcggtgcgcccgatcaaacctgaagacgtggtgcgtgggcagtacgcgtccggtgcggtcaatcgcagcgccgtgccgggataccgcgaagaagacacggtaccggacgagtcggaaaccgaaaccttcgtggcgatgaagttgcaggtcgacacctggcgctgggccggcgtgccgttctatctgcgcaccggcaagcgcctgcgcgaacgcaccaccgagattgcgatccgcttcaagcctgcaccgttggcgccattccgcagcaccgaagtgggcggctacggccccgactggctggtgctgcatatccagcccgacgaaggcatctcgctgcagttcgacgtcaagcgcccgggcgcgcaagtggcgttggcgccggtgcggatggacttccgctaccgcgactggttcccgaaggaatacaccgttggctacgagcgcttgctgcaggactgcatgaatggcgaggccggtctgttccaggatgcagcgatggtggaaggcgcgtggcgcatcgtgcagccgatcctggatgcgtggaagcaaccgcccagtgactttcccaattacgcggctggcagtgccggcccgtcggcggccgatgcgttgctggcgatgaacggcgggcacgcctggcgtgcgctcactccgggccgcaaaccgccgccgcgtcgcccgcctgaagcgcgtgcgggtgcggcggcaccggcgaagaagagcgccaagaaggcggtcaaaaaggctgcgaaaaaagtcgccaaggcgcctgccaagcgcagcgctgcggttgccgggaaatctgcagcggcggcgtcgccgagcaaggcggcaagcaaggcggtcaccaagcgcgccaccaaaaaggcgacgaagccggcaaccaaagtcgtcaagaagagcgcttcgtag

SEQ ID NO: 218 - protein, 640 aa, Xanthomonas campestris
MQRRGPARRRVRPAQQTHAWQLPARVFPRGPGQCGIAPAWTHGREGDASMSEQVTTPPCIIVVFGARGDLTRRLVMPALYNLRRAGALGEEFAIVGMDHGDITERAWRTNMGKAMTELLSSRDAEFQADGFDTDTWDWLRERMHYVRGDFTDLRAYQSLDGVLEKLHKRYGTRGNVLFYLATAARFFEPVLLNLGEAGLVKQREGAGWRRVIVEKPFGHDLPSAKHLNATVARVLHEDQVFRIDHFLGKETVQNILAFRFANGLFEPVWNRDRIDHVQITAAETIGVEGRGRFYDPTGCLRDMVPNHLFQLLAMIAMEPPAAFTTEAMHRRRAEVIEAVRPIKPEDVVRGQYASGAVNRSAVPGYREEDTVPDESETETFVAMKLQVDTWRWAGVPFYLRTGKRLRERTTEIAIRFKPAPLAPFRSTEVGGYGPDWLVLHIQPDEGISLQFDVKRPGAQVALAPVRMDFRYRDWFPKEYTVGYERLLQDCMNGEAGLFQDAAMVEGAWRIVQPILDAWKQPPSDFPNYAAGSAGPSAADALLAMNGGHAWRALTPGRKPPPRRPPEARAGAAAPAKKSAKKAVKKAAKKVAKAPAKRSAAVAGKSAAAASPSKAASKAVTKRATKKATKPATKVVKKSAS

SEQ ID NO: 219 - DNA, 1431 bp, Xanthomonas campestris
  CDS (1)..(1431)
atgcacaacaccctgatcctgttcggcgccaccggcgatctcgcccagcgctatctctttccatccctgctgcgcctgtttgtcgacggcctgttgccggaggacttccgcatccgtgcgttggccctgtcgcagcacgacaccgacgccttccgcgaggtactgcgcccgcgcctggcccaggcgctgccgattgccaccgccgcgcagatcgatgcgctgctgcagcgcatcgactaccgctcggcggacctgcgcaatgccgaatcggtggccgaggccgtgcgcgaactggccagccgccagtgcgtaagctatctggcgattccaccgggcctgtacatcagtacctgccagggcctggccctgggcggcgcgctggctgcaccgcaccggttgatgctggaaaaaccgatcggccacgattcggacagcgcccgcgagatcctgcagtcgatcggcgcactgatcgacgaagaccgcgtgttccgtctcgaccactacctgggcaaggccgcggtgcagaacctggtggcgctgcgcttcggcaacaccttgctggaagcggtgtggaaccggacctacatcgaatcggtacagatcctggtggccgagagcgaaggcgtggacggccgcgatgcctactacgcccgctccggcgcgctgcgcgacatggtgcagagccatatcctgcagttgctgtgcctggtggccatggagccgccggcctcgctggaagccgaccgcatccgcgacgagaaggtcaaggtgctgcgcgccttgcgcccgatgaccgccgagcacgccgcgcaagacagcgtgcgtggccgctacaccgccggcagcatcaacggcgagccggcgcaggcctaccacccgccggaaggcagcgatgtggaaaccttcgtcgcggtcaccgcgcacatcgacaactggcgctgggctggcgtgccgttccacctgtgcaccggcaagcgcctggctgagcgctccacgcgcatcgtggtcacgctcaagccggtgacgcattggttgttcgagcgtccggaccgccagaacgcggtgcccaaccgcctgaccttccagctgcagccgctggaaaacatcgagctgggcctgatgagcagcctggccggcccggaatggggtgcgatcgaactgcagccgctggaactggagctgtccgtgcccaccggcctgcaccgccgtatcgcgtatgaacgcttgttcgtggatgccttcaacggcaacccggcgctgttcgtgcgcgatgacgaggtcaaggccgcctgggcctggatcgacagcgtcagcgatgcctggtcggacgcacagctgccgctgcagccgtatccggccggtagctggggccccgagaccgccgcaccgttcctgcccccggccaccgacgcacagggaaacaacgcatga

SEQ ID NO: 220 - protein, 476 aa, Xanthomonas campestris
MHNTLILFGATGDLAQRYLFPSLLRLFVDGLLPEDFRIRALALSQHDTDAFREVLRPRLAQALPIATAAQIDALLQRIDYRSADLRNAESVAEAVRELASRQCVSYLAIPPGLYISTCQGLALGGALAAPHRLMLEKPIGHDSDSAREILQSIGALIDEDRVFRLDHYLGKAAVQNLVALRFGNTLLEAVWNRTYIESVQILVAESEGVDGRDAYYARSGALRDMVQSHILQLLCLVAMEPPASLEADRIRDEKVKVLRALRPMTAEHAAQDSVRGRYTAGSINGEPAQAYHPPEGSDVETFVAVTAHIDNWRWAGVPFHLCTGKRLAERSTRIVVTLKPVTHWLFERPDRQNAVPNRLTFQLQPLENIELGLMSSLAGPEWGAIELQPLELELSVPTGLHRRIAYERLFVDAFNGNPALFVRDDEVKAAWAWIDSVSDAWSDAQLPLQPYPAGSWGPETAAPFLPPATDAQGNNA

SEQ ID NO: 221 - DNA, 1839 bp, Xanthomonas axonopodis
  CDS (1)..(1839)
atgagtgagcaagcaaccacaccgccgtgcatcatcgtggtgttcggcgcacgcggcgatctgaccaagcgcctggtcatgccggcgctgtacaacctgcgccgttccggtgcgctgggcgatgatttcgccattgtcggcatggaccatggcgacatcagcgagcgcgcctggcggaccaacatggggcagtcgatgacgcagctgctcagcagccgcgatgccgaattccagaccgacgaattcgacaccgccacctgggactggctgcgcgaacgcatgcattacctgcgcggcgacttcaccgatcagggagcctatcgatcgctgggcggcgtgctggacaagctgcacaagcgctacggcacgcagggcaatgtgctgttctatctggccaccgccgcgcgcttcttcgagccggtattgctcaacctgggcgaggctggcctggtcaagcagcgcgaaggcgaaggctggcgccgggtcatcgtggaaaaacccttcggctacgatctgcccagcgcccagcacctcaatgccacggtcgccaaggtgctgcacgaggatcaggtgttccgcatcgatcatttcctgggcaaggaaaccgtgcagaacattctcgcgttccgcttcgccaatggcttgttcgaaccggtgtggaaccgcgaccgcatcgaccatgtgcagatcaccgcggccgaaaccatcggagtggaagggcgcggacggttctacgaccccaccggctgcctgcgcgacatggtgccgaaccatctgttccagctgctggcgatgattgcgatggagccgccagcggccttcaccaccgaggcgatgcatcgccgtcgcgccgaagtgatcgaagcggtgcgcccgatcaaacccgaagacgtggtgcgcgggcaatacgcctccggtgcggtcaatcgcaatgcggtgccgggttatcgcgaagaagacaccgtgcccgacgattcggacaccgaaacctatgtggcgatgaagctacaggtggacacctggcgctgggccggcgtgccgttctacctgcgcaccggtaagcgcctgcgcgaacgcacgaccgagatcgccattcgcttcaagccggcaccgctggcgcccttccgcagtaccgaggtgggcggctacggccccgactggctggtgctgcatatccagccggacgagggcatctcgctgcagttcgacgtcaagcgtccgggcgcgcaggtggcactggcaccggtgcgcatggacttccgttaccgcgactggttccccaaggaatacacggtgggctacgagcgcctgctgcaggactgcatgaacggcgaagccggcttgttccaggatgcggccatggtggaaggcgcatggcgcatcgtgcaaccgatcctggatgcatggaaacaacccccaagcgacttccccaattacgccgccggcagcgccggcccttcggctgccgatgcactactggcaatgaatggcggacacgcctggcgcgcactcaccccagggcgcaagccgccaccgcgccggccgccggaagcgcgtgctggcgctgccgcgccgattaagaaaaccaccggcaaatctgccaagaaggccgccaaggcgccggccgagaaggtcaccaaggcgccagccagacgcgcatctgcggcttcagcaagaccatcgcaggatgcggctacgtcgcctagcagcgcggccaggaaggccgtgagcaaacgcgtaaccggcaaggtcgcaaaggccgccggcaaaaccgcggcaggcaagggcgcagcgaagaagtcggccagcaagaccgtggcgcgcacgccacgccgctga

SEQ ID NO: 222 - protein, 612 aa, Xanthomonas axonopodis
MSEQATTPPCIIVVFGARGDLTKRLVMPALYNLRRSGALGDDFAIVGMDHGDISERAWRTNMGQSMTQLLSSRDAEFQTDEFDTATWDWLRERMHYLRGDFTDQGAYRSLGGVLDKLHKRYGTQGNVLFYLATAARFFEPVLLNLGEAGLVKQREGEGWRRVIVEKPFGYDLPSAQHLNATVAKVLHEDQVFRIDHFLGKETVQNILAFRFANGLFEPVWNRDRIDHVQITAAETIGVEGRGRFYDPTGCLRDMVPNHLFQLLAMIAMEPPAAFTTEAMHRRRAEVIEAVRPIKPEDVVRGQYASGAVNRNAVPGYREEDTVPDDSDTETYVAMKLQVDTWRWAGVPFYLRTGKRLRERTTEIAIRFKPAPLAPFRSTEVGGYGPDWLVLHIQPDEGISLQFDVKRPGAQVALAPVRMDFRYRDWFPKEYTVGYERLLQDCMNGEAGLFQDAAMVEGAWRIVQPILDAWKQPPSDFPNYAAGSAGPSAADALLAMNGGHAWRALTPGRKPPPRRPPEARAGAAAPIKKTTGKSAKKAAKAPAEKVTKAPARRASAASARPSQDAATSPSSAARKAVSKRVTGKVAKAAGKTAAGKGAAKKSASKTVARTPRR

SEQ ID NO: 223 - DNA, 1431 bp, Xanthomonas axonopodis
  CDS (1)..(1431)
atgcacaacaccctgatcctgttcggcgccaccggcgatcttgcccagcgctatctctttccttccctgctgcgtctgttcatcgacggtctgttgccggaggacttccgcatccgtgcgctggcgctgtcgccgcacgacaccgatgcatttcgcgacgtgctgcggccgcgcctgaccgaagcgctgccgatcgcgaccgccgaacagatcgacacgctgctacaacgggtcgactatcgctcggtggatctgcgcaatgccgattcggtggccgacgcggtccgcgaactggccagccgtcggtgtgtgagctatctggcgatcccgccgggcctgtacatcagcacctgccagggcctggcgctgggtggcgccctggcggcaccgcatcgcttgatgctggaaaaaccgatcggccacgactcggacagcgcccgcgacatcctgcagtcgatcggcgcgctgatcgacgaagaccgcgtgttccgcctggaccattacttgggcaaggcagcggtgcagaacctgatcgcgctgcgcttcggcaacacgctgctggaggcggtctggaaccggacctacatcgagtcggtgcagatcctggtcgccgaaagcgaaggcgtcgacgggcgcgatgcctactacgcccgctccggcgccctgcgcgacatggtgcagagccatatcctgcagctgttgtgcctggtggcaatggagccgccggcctcgctggaagccgaccgcatccgcgatgagaaggtcaaggtgctgcgcgccctgcgcccgatgaccgccgagcacgccgcgcacgactgcgtgcgcggccgctacaccgccggcagcatcaacggccagccggcgcaggcctaccacccgccggaaggcagcgacgtggaaacctttgtcgccgtcaccgcgcatatcgataactggcgctgggccggcgtgccgttccacctgtgcaccggcaagcgtctggccgagcgctccacccgcatcgtggtgacgctcaagccggtgacgcactggctgttcgaacgccccgaccgccagaacgcggtgccgaaccgcctgaccttccagttgcagccgcaggaaaacatcgagctcggcctgatgagcagcctggctggcccggaatggggtgcgatcgaactgcagccgctggaactggaactgtcggtgccgaccggcctgcaccgtcgtatcgcctacgaacgtctgttcgtcgacgccttcaacggtaaccccgcgctgttcgtgcgcgacgacgaggtcaaggcggcgtggtcgtggatcgacagcgtgagcgacgcctggaaagacgccgcgctgccgctgcagccctacccggccggcagctggggtcccgaatcggccgcccacttcctgcccccggccaccgacgcacagggaaacaacgcatga

SEQ ID NO: 224 - protein, 476 aa, Xanthomonas axonopodis
MHNTLILFGATGDLAQRYLFPSLLRLFIDGLLPEDFRIRALALSPHDTDAFRDVLRPRLTEALPIATAEQIDTLLQRVDYRSVDLRNADSVADAVRELASRRCVSYLAIPPGLYISTCQGLALGGALAAPHRLMLEKPIGHDSDSARDILQSIGALIDEDRVFRLDHYLGKAAVQNLIALRFGNTLLEAVWNRTYIESVQILVAESEGVDGRDAYYARSGALRDMVQSHILQLLCLVAMEPPASLEADRIRDEKVKVLRALRPMTAEHAAHDCVRGRYTAGSINGQPAQAYHPPEGSDVETFVAVTAHIDNWRWAGVPFHLCTGKRLAERSTRIVVTLKPVTHWLFERPDRQNAVPNRLTFQLQPQENIELGLMSSLAGPEWGAIELQPLELELSVPTGLHRRIAYERLFVDAFNGNPALFVRDDEVKAAWSWIDSVSDAWKDAALPLQPYPAGSWGPESAAHFLPPATDAQGNNA

SEQ ID NO: 225 - DNA, 1458 bp, Thermoanaerobacter tengcongensis
  CDS (1)..(1458)
atgaaagataaagacctttcaaacgtgatggtcatattcggtggaacaggagatttaacccataaaaaattgatgccggccctttacaacttaagatatcaaaatatcctgcctgaaaattttgctgtagttgctatagggagaagagacaagactgaagaggaatatagaaatgagatgctggagtctgttaaaacttattctagatttgacattgacgaaaaaatctggcaagatttaagtagcaggatattctacaaaagatttgattttaactatgacaacggatatatggaacttagttactttttagatgaactggataggaaatacaatacacagggcaacagggtatattatcttgcagttgcaccggaatattttggcatcattgtggaaaagttatacagacacggaatggtaagtaatgaaacttcatggcagagagtagttatagaaaagccttttggagaaaatttagaatctgcccggaaactaaataaaatgataacagatgtctttacagaaagaaatacttatagaattgatcactatttaggaaaagagatgctacagaatataatggtcatcagatttgccaatgtgttttttgagccagtttggaacagaagatatatagacaatgtgcaaatttcttctaatgagacggtagggatagaaaatagaggaggatactacgagaaagcaggagctttgagggacatggttcaaaaccacatgatgcagcttctgaccttgacggcgatggaaccacctgtaaatttggatacagaatctataagggatgagaaggtgaaggttttaaaatccttagagattatgactcctgagcttgtagagaaaaatgtggtgagagggcagtatgtgggatataggcaggaggaaaaagtatctccaacttccaatacagagacttttgtggcattaaaagtgcacatagaaaatttcagatgggcaggagttcctttttacatcaggactggaaaaaggatgccggaaaaatccacacagattgtcatccaatttaagcctctgccaggtattttgtatttcaaagagtataaaaatttgcttcccaatttgcttgtaataaaaattcagccggaggaaggagtaaaacttcagtttaatgccaaagtgccgggagcaggagatataactatagagcctgtaaatatggatttttgtcagaactgccagatatccaataattctccagaggcatatgaaagacttctttttgatgtgatgagaggagattctactttatttactcgctgggatgaggtagaatattcttggaggtttgtagatgctattgctaaagcatgggcagaaaaaacacccgattttcctaattactatccagggacctggggtcctagtgaggcagaagagcttttgagaagagatggaagaatgtggtggaatgtatag

SEQ ID NO: 226 - protein, 485 aa, Thermoanaerobacter tengcongensis
MKDKDLSNVMVIFGGTGDLTHKKLMPALYNLRYQNILPENFAVVAIGRRDKTEEEYRNEMLESVKTYSRFDIDEKIWQDLSSRIFYKRFDFNYDNGYMELSYFLDELDRKYNTQGNRVYYLAVAPEYFGIIVEKLYRHGMVSNETSWQRVVIEKPFGENLESARKLNKMITDVFTERNTYRIDHYLGKEMLQNIMVIRFANVFFEPVWNRRYIDNVQISSNETVGIENRGGYYEKAGALRDMVQNHMMQLLTLTAMEPPVNLDTESIRDEKVKVLKSLEIMTPELVEKNVVRGQYVGYRQEEKVSPTSNTETFVALKVHIENFRWAGVPFYIRTGKRMPEKSTQIVIQFKPLPGILYFKEYKNLLPNLLVIKIQPEEGVKLQFNAKVPGAGDITIEPVNMDFCQNCQISNNSPEAYERLLFDVMRGDSTLFTRWDEVEYSWRFVDAIAKAWAEKTPDFPNYYPGTWGPSEAEELLRRDGRMWWNV

SEQ ID NO: 227 - DNA, 1446 bp, uncultured proteobacterium
  CDS (1)..(1446)
atgaccggagtcgacctaattatttttggcgcttccggagacctttcagcaagaaagctctttcccgcactgtttcaactcgaccgcgccgaattactgcccagcgacctgcgcatcacagcaattgctagagatcaggtcgacgtaaatacttttttggaaggcctaagacagcgaatgcatgcctacatgggctctgagtcgccttccgatgccgagtggcagcactactcacgacattttcaatatgtgggcgccgacttcgccaacgctgacagctattccagtatcagggcaactctagatgatacccgtatcagcttattttacttggctacaccacccagcatcttcgccctaatttgcaacaatctggccactaataattgcctcaccggcgactgccgaatcgtactcgaaaaacccattggcgaatgtctagcctcgtcaaaggaagtcaatgaaacgctggctcgctactttgacgaaggatctatttatcgcatagatcactacctgggaaaggagaccgttcagaacttactcgcgctgcgctttgcaaaccgatttattaatagtcagtgggatgccaactgtatcgaccatgttcaaatcaccgtcggcgaaatcgtcggtattgagggtcgctggtcttactatgaccgcgttggccagctccgcgacatggttcaaaaccaccttatgcagttactctgtctcgtcgctatggagccccccaatagcctagaagccgatagcatccgcgacgaaaaagtcaaaatcgtcaaggccttgagacgcatcgactctgatcaggtctctgagcacgtgattaaagggcaatacagccagggttggtcttcaggtgcggccgtgcctgggtaccttgaggagcccggttgtgagcgcccggacagcgataccgagacgtttatcgcgatcaaagctcatgtagacaactggcgctgggccggcgttccattttacctgcgaacaggaaaacgcgttcctgaaaaattaactgaaatcatcattcagtacaaagaccttccccacaacatttttagcggcggcaccagcgcgaacaagttaatcattcggttacagcccagggaaggcatcgagctaacaatggcatcgaaacgccagacgctgcgagaaaaactgtccttacagaaccataccttggatttagattttcgggaaaccaccggcatgaatcgaattcccgacgcctacgaacgattatttcttgatgcaattaatggcgatcagtcgctgtttgtaggtcgagaggagatcgaagaaagctggcgctggtgtgatgaactgattgacgcctgcaaccaaaagaacatagagaccaagccctatcacgctggatcttggggcccacctaaagccgagcttttaattgaaaaggatgggcgtagctggcatgtctga

SEQ ID NO: 228 - protein, 481 aa, uncultured proteobacterium
MTGVDLIIFGASGDLSARKLFPALFQLDRAELLPSDLRITAIARDQVDVNTFLEGLRQRMHAYMGSESPSDAEWQHYSRHFQYVGADFANADSYSSIRATLDDTRISLFYLATPPSIFALICNNLATNNCLTGDCRIVLEKPIGECLASSKEVNETLARYFDEGSIYRIDHYLGKETVQNLLALRFANRFINSQWDANCIDHVQITVGEIVGIEGRWSYYDRVGQLRDMVQNHLMQLLCLVAMEPPNSLEADSIRDEKVKIVKALRRIDSDQVSEHVIKGQYSQGWSSGAAVPGYLEEPGCERPDSDTETFIAIKAHVDNWRWAGVPFYLRTGKRVPEKLTEIIIQYKDLPHNIFSGGTSANKLIIRLQPREGIELTMASKRQTLREKLSLQNHTLDLDFRETTGMNRIPDAYERLFLDAINGDQSLFVGREEIEESWRWCDELIDACNQKNIETKPYHAGSWGPPKAELLIEKDGRSWHV

SEQ ID NO: 229 - DNA, 1762 bp, Oryza sativa
  CDS (41)..(1558)
ggtatattgctgaaggaagaagagcaccaacctatttatcatgtcaggaggatcttcaccaaggtcaagacgaagcagctttaattctttatcaagagatctcgaactcccttcagagcaaggttgtctctctgttattgtcctcggggcttctggagacctagccaagaagaaaactttcccggcactcttccatctttttgcacagggatttatacaatcaggtgaagtgcatatatttgggtatgcgagatcaaacctttctgatgatgggttaagggaacgcattcgtggatacctcaaaggagcctcagaagaacatctctcagactttttgcaacatataaaatatgtcagtggttcctatgacagcggagaaggatttgagaaattgaacaaggaaatttcagagtatgagaagtcaaacaaatcagaaagccctcgcaggctcttctatttggcattgcctccatctgtctacccttcagtctgcaaaatgatcagaacatattgcatgaatccatctggatggactagagtcattgttgagaagccatttggaaaggacttggactcttcagaagaattaagtgcccaacttggggagctatttgacgaaaaccaactctacagaattgatcactacttgggaaaagagttggtccaaaacctgcttgtgcttcgttttgccaaccgcttgttcttgcctctttggaaccgcgacaatattgataatatacagattgtattcagggaggactttgggactgacgggcgtggtggatattttgatcaatatggaatcattcgtgacatcatccagaaccatttgttacaggttttctgtttggttgcaatggaaaagcctgtctctcttaagcctgagcacattagagatgagaaagtcaaggttctgcagtccgtgaaccctataaagcatgatgaggttgtccttggacaatacgaggggtacaaggatgaccctacagtgccagatgactcaaacaccccaacttttgcatctgtcgtgtttcgggtacacaatgaaagatgggagggtgttcctttcattcttaaagctggtaaagcactaagctcaaggaaagcagaagtccgtgtgcagttcaaagatgttcctggtgacatctttaaatgtaaaaggcaaggaagaaatgagtttgtcatacgccttcagccatcagaagccatgtacatgaaacttactgtcaaaaaacctggattggagatggccaccgagcagagtgaacttgatctgtcatacgggatgcggtaccaaaacgtcaaaattccagaggcatgcgagcgtctcatattggatacgatacgaggagaccaacagcacttcgttcgccgagatgagctgaaggctgcttggcagatcttcactcccctgctgcacgacatcgacgaaggcaaggtgaagtctattccataccagcctggcagccgaggccccaaggaagccgatgaactgagcgagagggttgggtatatgcagacccacggttacatatggataccacccacccttgcatagacagacagacagacagacagtagtattgtttagctaggaagagtgcctctaaactgttattattgcggatatattcgtttcatattttcacgataacgcctgactagtgactacctggcgttgtaataatgtgttgcttcgtaagtataactgctattgtgaaataaaagtgcatgtttcgatcaaaaaaaaaaaaaaaaaaaa

SEQ ID NO: 230 - protein, 505 aa, Oryza sativa
MSGGSSPRSRRSSFNSLSRDLELPSEQGCLSVIVLGASGDLAKKKTFPALFHLFAQGFIQSGEVHIFGYARSNLSDDGLRERIRGYLKGASEEHLSDFLQHIKYVSGSYDSGEGFEKLNKEISEYEKSNKSESPRRLFYLALPPSVYPSVCKMIRTYCMNPSGWTRVIVEKPFGKDLDSSEELSAQLGELFDENQLYRIDHYLGKELVQNLLVLRFANRLFLPLWNRDNIDNIQIVFREDFGTDGRGGYFDQYGIIRDIIQNHLLQVFCLVAMEKPVSLKPEHIRDEKVKVLQSVNPIKHDEVVLGQYEGYKDDPTVPDDSNTPTFASVVFRVHNERWEGVPFILKAGKALSSRKAEVRVQFKDVPGDIFKCKRQGRNEFVIRLQPSEAMYMKLTVKKPGLEMATEQSELDLSYGMRYQNVKIPEACERLILDTIRGDQQHFVRRDELKAAWQIFTPLLHDIDEGKVKSIPYQPGSRGPKEADELSERVGYMQTHGYIWIPPTLA

SEQ ID NO: 231 - DNA, 1305 bp, Encephalitozoon cuniculi
  CDS (1)..(1305)
atgaaggtcgttatcttcgggtccagtggcgatcttgcaaaaagaaagctttttcctgcactctctcggattgacttggagggtgtcggggtggttggctatgcaaggaccaagtacaacatcgagttttcggaagttcttcaggaggtcgggaactactcgccggaatttctttcgaaggtcacctacattccagggccctacgatgacctttcgaagcttaaagaggtctcagactcggagactgtgctgtacttttcagttccatcctctgtgtacacttgtttattcagagagatatcgaagcttgactacaaggtgattggagtcgagaagccatatggagatagcattgagtcgtttatggagataaaggggtttgatctggggaagaccaggtttattgaccactatcttctgaagccgcttgtggtggctatgcctgggattataagggagacgggggcgattcgagaggtgatgagcaacagatatgtgaagagtgttgagatagtctcgaaggaagttcttgggggagagggaagacactacttcgataagaacggaattataagggacatggtcctgagccacatgggcgagcttcttggggttgttgcgtctgacgtaacaaagccatcgaggattatggaagcattggcgagaatggaggttttcaaggcatgcaccgtcgacaccgagagatgcatttatgggcagtatgacgactatattaaggagattcacaaggactcgagtacggagacgttctgcatggttcccataagcatagggactccccgctggtctaaggttcccttcatcattgttgcagggaaggggatgaacgaaaagagaacagagataatacttgagtttcgaagagatgtatttgcgaagtgcattgagctgttttctatgccgaggcaatcttcgtgcaggattgttcacaccaacgaaatagaaacggttcgactggtctttaatatatatcctgaatgcgaagtatttctggaagttctcgtgggaggggagcctgtccggtatgttctgcatgacaagaaagagattgatggcctgatgcatgacagttatggaggataccatgactatgagatcatctttgacagtcttgtaagaggcaaggactttagcagcgtgagctctcaggaggcagagcttctgtggaaggtgtttaaccccatactatctattagcaaagaggacatgctgttctactattctaagggaattgacatgcctaaggaagctgaagaaatgatcagggaaattaaagaccattag

SEQ ID NO: 232 - protein, 434 aa, Encephalitozoon cuniculi
MKVVIFGSSGDLAKRKLFPALSRIDLEGVGVVGYARTKYNIEFSEVLQEVGNYSPEFLSKVTYIPGPYDDLSKLKEVSDSETVLYFSVPSSVYTCLFREISKLDYKVIGVEKPYGDSIESFMEIKGFDLGKTRFIDHYLLKPLVVAMPGIIRETGAIREVMSNRYVKSVEIVSKEVLGGEGRHYFDKNGIIRDMVLSHMGELLGVVASDVTKPSRIMEALARMEVFKACTVDTERCIYGQYDDYIKEIHKDSSTETFCMVPISIGTPRWSKVPFIIVAGKGMNEKRTEIILEFRRDVFAKCIELFSMPRQSSCRIVHTNEIETVRLVFNIYPECEVFLEVLVGGEPVRYVLHDKKEIDGLMHDSYGGYHDYEIIFDSLVRGKDFSSVSSQEAELLWKVFNPILSISKEDMLFYYSKGIDMPKEAEEMIREIKDH

SEQ ID NO: 233 - DNA, 2125 bp, Drosophila melanogaster
  CDS (158)..(1738)
gcgatttttgcctcagtctatacctccaggcaatatctatcactaatcttttttaaattacaactatttattcttggccaaaatttgacgttaccttgctttcttttattctctcaaaattatactttacccgaaatgatttccatggacccccacaatgaggaggcgtattccatcgtggtcttcggagcctcaggcggattggccaaaaagaaggtgtttccggcgctttgggctctcttccgggagaatcggctgccccagggcaccaaaatatttactttcacccggtccccgctgcagacgaagacgtaccggttgcagattcttccctatatggagctggacaagcatcgggaccccaagaagtacaacctctctttggacgaccgtgcactgtgtgcagggcgagtacgacaagccggagaactacgtggcactcacggaggcgatggtacaccaggagacaaagcacaatcaggtgcgcgcgaatcgaatcttctacctggcgctgccaccgatcgttttcgatcaggtgaccctcaatgtcagtcgaaaatgcagctcgaccacgggatggaaccgcataatagtggagaagcccttcgcgcgggacgacatctcctacaaggcctttcaaacctcgctgtgcaactgcttccgggagtcgcagatttacctgatggaccacctcctcagccggcaggtgatgcagaacttctttgcgctgcgctattcaaaccacttgtgggccgagaccctgaaccaccgccacgtggcggcggtgatgatatccataaagtgtgagctgccggtgtcggtgaatcgggcagactactttaatcagtttggcattattcgcgacctgatgaccaaccacatgatccagatgctggccatgctggctatggatcagccgtacgccaacactgctgacgacctgcgtgccgaacggctgaaggttcttcgccaggtgctaactcccaacataggcgacgtcgtcttggctcaataccgcaacaaccggcgggagactgaccccgcgaagtgcggctacacggagcacacctacatcccgaaggactcctttacgcccacattcgctctggtggtgctgcacatcaacaaccgccgttggaccggggtacccttcattctcagagcgggaaaggccttgaacgacaccaagtcggaggtgcgtatccagtacaagccggtggactgcgacaccttccacagcgacagtactgacattcgtaacgagctagtcctgagatccttccccacggaagaggtctttatgcgcatgcgcctcaagcggcagggcgaggatatctgccttcgggagagcgagatcaacctgcgagtggatgatcggggaccgaagggactccaaggactgcccggctacctgctcaacgtgtttcaaggcgaccagacgctcttcatgcgctccgatgagcagtgcgagatttggcgcatattctcccccgttctcgccaccatcgattcggatcgtccccgcccgttgcactatgactttggatcacggggtcctttgctggcctatcgcaaggccgagcgcgctggcttcgtattcttcgccacggacgagtggcatcagagcgaagagacgttagaatacacggtcaagaagagcaagcagctaatcggaccccataccgccctcaagccagtaagagatcctcggtccaagaggtcgaattccaatccttaggcgtagggagatagttaaagcttatacgaaagttttttaattaagcaagtgcagcctgctgtgttacaccagttggccaccacttcaccttggctgcccagtctaacccttcaccgctgtccgttccattcggttctaatccgttccgtgccattgttgcccatgttgccggtgaggatttcgccaagaggggcgtaaacaacacgcaagtcttggccattgtcctttgcagataggggtgagatgcactatagtgtatgggaactacgtaattctctataaatttatatctacttatatttgtacatacaaaattgttttcagtttaataaaaattttatttaaattacaaaaaaaaaaaaaaaaaaaaaaaaaaaaaaaaaaaaa

SEQ ID NO: 234 - protein, 526 aa, Drosophila melanogaster
MRRRIPSWSSEPQADWPKRRCFRRFGLSSGRIGCPRAPKYLLSPGPRCRRRRTGCRFFPIWSWTSIGTPRSTTSLWTTVHCVQGEYDKPENYVALTEAMVHQETKHNQVRANRIFYLALPPIVFDQVTLNVSRKCSSTTGWNRIIVEKPFARDDISYKAFQTSLCNCFRESQIYLMDHLLSRQVMQNFFALRYSNHLWAETLNHRHVAAVMISIKCELPVSVNRADYFNQFGIIRDLMTNHMIQMLAMLAMDQPYANTADDLRAERLKVLRQVLTPNIGDVVLAQYRNNRRETDPAKCGYTEHTYIPKDSFTPTFALVVLHINNRRWTGVPFILRAGKALNDTKSEVRIQYKPVDCDTFHSDSTDIRNELVLRSFPTEEVFMRMRLKRQGEDICLRESEINLRVDDRGPKGLQGLPGYLLNVFQGDQTLFMRSDEQCEIWRIFSPVLATIDSDRPRPLHYDFGSRGPLLAYRKAERAGFVFFATDEWHQSEETLEYTVKKSKQLIGPHTALKPVRDPRSKRSNSNP

SEQ ID NO: 235 - DNA, 1470 bp, Ralstonia solanacearum
  CDS (1)..(1470)
atgtcggtgcccgcattcgacatggtgttgtttggcggtacgggtgatctggcccgccgcaagctgattccggccttgttcgatgcgcaccaggggggcgagctccattcgcgcgggcggatctttgccatcggcacccagccgctggagaccgccggttacctggccctgctcgagcgggaggtgcgccccaccatgcgcctgtattccggcgcgcccgtgtcggacgatgcctgggcctctttcgtcgcccgcatcgtctaccagcaggtcgatgcccgcaagccggaacagttcgatgccctggccgccgcgctgggcgagaaccgcgccccggtcaccgtgtgctacctggccaccgcgcccggcattttcgtcgacatctgcgcgcagcttgcccgcgtcggcctgaacacgcccaacgtgcggttggtgctcgagaagccgctgggcaccgacctggcctccaacgagcgcatcaattcggccgtggccgagttctttgccgaagaccagatctaccggatcgaccactacctcggcaaggagtcggtgcagaacctgatggcgatccgcttcggcaacgcgctgttcgagccgctgtggcgccgcgagtggatcaaggacgtgcagatcaccatcgccgagcagctcggcgtggagaagcgcggcgacttctacgacggcgtcggcgccctgcgcgatatggtgcagaaccacctgctgcagctggtgtgcatcgtcgccatggagccgcccgccagcctgtcgcaggacgccatccgtgacgagaagctgaagatcctcaaggcgctcaagccgatcccgctgcaggaggtgcccgagaagaccgtgcgcggccagtatctggagggcgccatcgccgggcagccggtgcagggctacctggacgagcacggcattccgcatgacagccgcaccgagaccttcgtcgccatcaaggccgagatcgccaactggcgctgggccggcgtgccgttctacctgcgcaccggcaagcgcatgccgcagcggctggcggagatcgtggtgcgttttcatgacgtgccgcacgcgctgtttcccaagccgctggtccagttccccgagaaccgcctggtgatccgcctgcagccggaggaaagcatccgcctgcagttcctgaccaaaacgccgggcgcggcactgggcctgcagccgtccacgctggacctggatttcaccaaccacggcggcgtgcgccacgccggcgcctacgagcgcctgctgatggacgccgtcaacggccagcttggcctgttcgtgcgccgcgacgagcaggccgaggcctggcgctgggtcgagcccatcatcgaggcatggaaccaggcccgcacgccgcccaagggctacacggcgggcagctgggggccggccgcttccagcgcgctgctctcacgcgatgccgctgcctggcacgaggagatgtga

SEQ ID NO: 236 - protein, 489 aa, Ralstonia solanacearum
MSVPAFDMVLFGGTGDLARRKLIPALFDAHQGGELHSRGRIFAIGTQPLETAGYLALLEREVRPTMRLYSGAPVSDDAWASFVARIVYQQVDARKPEQFDALAAALGENRAPVTVCYLATAPGIFVDICAQLARVGLNTPNVRLVLEKPLGTDLASNERINSAVAEFFAEDQIYRIDHYLGKESVQNLMAIRFGNALFEPLWRREWIKDVQITIAEQLGVEKRGDFYDGVGALRDMVQNHLLQLVCIVAMEPPASLSQDAIRDEKLKILKALKPIPLQEVPEKTVRGQYLEGAIAGQPVQGYLDEHGIPHDSRTETFVAIKAEIANWRWAGVPFYLRTGKRMPQRLAEIVVRFHDVPHALFPKPLVQFPENRLVIRLQPEESIRLQFLTKTPGAALGLQPSTLDLDFTNHGGVRHAGAYERLLMDAVNGQLGLFVRRDEQAEAWRWVEPIIEAWNQARTPPKGYTAGSWGPAASSALLSRDAAAWHEEM

SEQ ID NO: 237 - DNA, 1521 bp, Enterococcus mundtii
  CDS (1)..(1521)
atgaatgaaaaaaacgtattatttactatatttggcggtacaggagatttagcacaacgtaaattgtatccttccctttttcgtttatacaaaaagggcaacttgagcgaacattttgctgtgatcggtacagcacgtcgtccttggagcgatgaacactatcgtgaagtggttaaaggaacaatcaaaacattgaatccttctgccgaagaagccgaacgatttgccagccatttttattatcaatcccatgatgtcaatgattcttctcattaccaaacattaaaagaattatctgatcgtttagatgaaaaataccacttgaatggtaatcgaatgtactatttagccatggctccacaatttttcggtacgatcgtttcacatttgaaatctcagaaaatcatcactgaagctggcttcaaccgattgattatcgaaaaaccttttggttctgatttccattctgcctttgaattgaatgaaaaaattcgacaagtctttccagaagatgatattttccgtattgaccattatttaggtaaagaaatgatccaaaatatctctgcgattcgctttgccaataatatttttgagtctcaatggaacaatcgttacatcgacaacatccaaatcacttttggtgagagtttaggtgttgaagatcgtggcggctattatgaccacagtggtgcgttaaaagatatggtccaaaatcatatccttcaagtattagctttacttgcgatggaaccaccagttgccttttccgaaaaagaaatccgatcagaaaaaatcaaagcgttaaaagctattcgtatttatgaaaaaaaagaagtcttagaaaattttgtacgtgggcaatatgctgcaggtcaattagatgatcagacattcaaaggctatcgtgaagaagacaacgttgatccagaatcaacaactgaaacatttgttgctggaaaattcacgatcgataacttccgttggtctggcgtaccgttttatgtacggactgggaaacgtcttactgaaaaaggtacacgaatcaatatcgtctttaaacaagtacctgtcaatgtatttaaaacatcgatcgacgaaccttgtaatgatccaacgttaccaccaaatgttttgactatctatattcaaccaacagaaggtttttcatttacattaaatggaaaaaaagttggtcaaggcttcgccaccgatccaatcaaactggaatatcgcaatagtgctgaaatggtcgaaaatagtcctgaagcgtatgaaaagcttatgttagatgcattgaacggtgatagtacaaacttctctcattgggaagaagtcgcacaatcttggcatatcgttgacgtgatccgccaagtttgggatcaagtacaaccggatttcccgaattataaagctggttctatgggtcctgaagcagcattcgagcttttagaaaaagacgggttcgaatggatctggcaaccagatcattggtaccgtgaacgtggtaaattggattag

SEQ ID NO: 238 - protein, 506 aa, Enterococcus mundtii
MNEKNVLFTIFGGTGDLAQRKLYPSLFRLYKKGNLSEHFAVIGTARRPWSDEHYREVVKGTIKTLNPSAEEAERFASHFYYQSHDVNDSSHYQTLKELSDRLDEKYHLNGNRMYYLAMAPQFFGTIVSHLKSQKIITEAGFNRLIIEKPFGSDFHSAFELNEKIRQVFPEDDIFRIDHYLGKEMIQNISAIRFANNIFESQWNNRYIDNIQITFGESLGVEDRGGYYDHSGALKDMVQNHILQVLALLAMEPPVAFSEKEIRSEKIKALKAIRIYEKKEVLENFVRGQYAAGQLDDQTFKGYREEDNVDPESTTETFVAGKFTIDNFRWSGVPFYVRTGKRLTEKGTRINIVFKQVPVNVFKTSIDEPCNDPTLPPNVLTIYIQPTEGFSFTLNGKKVGQGFATDPIKLEYRNSAEMVENSPEAYEKLMLDALNGDSTNFSHWEEVAQSWHIVDVIRQVWDQVQPDFPNYKAGSMGPEAAFELLEKDGFEWIWQPDHWYRERGKLD

SEQ ID NO: 239 - DNA, 2630 bp, Homo sapiens
  CDS (474)..(2021)
agggacagcccagaggaggcgtggccacgctgccggcggaagtggagcctaccgcgagcgcgcgaggccgccggggcaggcggggaaaccggacataggggcggggccgggccggcgatggggatgcgggagcactacgcggagctgcacccgtgcccgccggaattggggatgcagagcagcggcagcgggtatggcaggcagccggcgggccggcctccagcgcaggtgcccgagaggcaggggctggcctgggatgcgcgcgcacctgccctcgccccgccccgcccgcacgaggggtggtggccgaggccccgccccgcacgcctcgcctgaggcgggtccgctcagcccaggcgcccgcccccgcccccgccgattaaatgggccggcggggctcagcccccggaaacggtcgtacacttcggggctgcgagcgcggagggcgacgacgacgaagcgcagacagcgtcatggcagagcaggtggccctgagccggacccaggtgtgcgggatcctgcgggaagagcttttccagggcgatgccttccatcagtcggatacacacatattcatcatcatgggtgcatcgggtgacctggccaagaagaagatctaccccaccatctggtggctgttccgggatggccttctgcccgaaaacaccttcatcgtgggctatgcccgttcccgcctcacagtggctgacatccgcaaacagagtgagcccttcttcaaggccaccccagaggagaagctcaagctggaggacttctttgcccgcaactcctatgtggctggccagtacgatgatgcagcctcctaccagcgcctcaacagccacatgaatgccctccacctggggtcacaggccaaccgcctcttctacctggccttgcccccgaccgtctacgaggccgtcaccaagaacattcacgagtcctgcatgagccagataggctggaaccgcatcatcgtggagaagcccttcgggagggacctgcagagctctgaccggctgtccaaccacatctcctccctgttccgtgaggaccagatctaccgcatcgaccactacctgggcaaggagatggtgcagaacctcatggtgctgagatttgccaacaggatcttcggccccatctggaaccgggacaacatcgcctgcgttatcctcaccttcaaggagccctttggcactgagggtcgcgggggctatttcgatgaatttgggatcatccgggacgtgatgcagaaccacctactgcagatgctgtgtctggtggccatggagaagcccgcctccaccaactcagatgacgtccgtgatgagaaggtcaaggtgttgaaatgcatctcagaggtgcaggccaacaatgtggtcctgggccagtacgtggggaaccccgatggagagggcgaggccaccaaagggtacctggacgaccccacggtgccccgcgggtccaccaccgccacttttgcagccgtcgtcctctatgtggagaatgagaggtgggatggggtgcccttcatcctgcgctgcggcaaggccctgaacgagcgcaaggccgaggtgaggctgcagttccatgatgtggccggcgacatcttccaccagcagtgcaagcgcaacgagctggtgatccgcgtgcagcccaacgaggccgtgtacaccaagatgatgaccaagaagccgggcatgttcttcaaccccgaggagtcggagctggacctgacctacggcaacagatacaagaacgtgaagctccctgacgcctacgagcgcctcatcctggacgtcttctgcgggagccagatgcacttcgtgcgcagcgacgagctccgtgaggcctggcgtattttcaccccactgctgcaccagattgagctggagaagcccaagcccatcccctatatttatggcagccgaggccccacggaggcagacgagctgatgaagagagtgggtttccagtatgagggcacctacaagtgggtgaacccccacaagctctgagccctgggcacccacctccacccccgccacggccaccctccttcccgccgcccgaccccgagtcgggaggactccgggaccattgacctcagctgcacattcctggccccgggctctggccaccctggcccgcccctcgctgctgctactacccgagcccagctacattcctcagctgccaagcactcgagaccatcctggcccctccagaccctgcctgagcccaggagctgagtcacctcctccactcactccagcccaacagaaggaaggaggagggcgcccattcgtctgtcccagagcttattggccactgggtctcactcctgagtggggccagggtgggagggagggacaagggggaggaaaggggcgagcacccacgtgagagaatctgcctgtggccttgcccgccagcctcagtgccacttgacattccttgtcaccagcaacatctcgagccccctggatgtcccctgtcccaccaactctgcactccatggccaccccgtgccacccgtaggcagcctctctgctataagaaaagcagacgcagcagctgggacccctcccaacctcaatgccctgccattaaatccgcaaacagcc

SEQ ID NO: 240 - protein, 515 aa, Homo sapiens [sequence omitted]

SEQ ID NO: 241 - DNA, 1491 bp, Pasteurella multocida
  CDS (1)..(1491)
atgaaaattgaagcagacaacaattgtattgtaatttttggtgcatcaggtgatttaacttatcgtaaattgattcctgcactgtataacttatataaaatcggtcgtttgactgagcatttctccgtgttaggtgtggcaagaacggaattaagtgatgagggtttccgtgaaaaaatgcgccaagcgttgatcaaaagtgaaaaagcgaatggcgaaacactcgatcaattttgtagccacctttattatcaggcattaaataccgcggatgctgccgattatggcaagttaattcctcgtcttgatgatttacatgataaatatcaaacctgtggtaacacactttactatttatccacgccgccaagtctttatggtgtgattccagaatgtcttgcggcacatgggttaaatactgaagagtttggctggaagcggttaattgtggaaaaaccgtttggttatgatatccgcacggcaaaagaactcgatattcaaattcaccgtttctttgatgaacaccaaatttatcgtattgaccactatcttggtaaagaaacggttcaaaatctgctcgtgctgcgtttttctaatggatggtttgaaccactctggaaccgtaattttattgattatattgaaatcacgggcgcagaatctatcggtgtagaagagcgtggtggttattacgatgattctggcgcaatgcgtgatatgttccaaaaccatttgttgcaagtgttagccatggttgcgatggagccaccggcaattattaatgctgactcaatgcgtgatgaagtggcaaaagtcttgtattgtttacatccattaagtgaggatgacttagaaaatcatttagtcttagggcaatatacggcaggcacagttgaaggtgaagcagttaagggctacttacaggaaaaaggtgtaccggcagagtctaatacggaaacttacatggcattacgctgtgaaattgacaactggcgttgggcgggtgtgccattttatgtgcgtactgggaaacggttaccaagtcgagtgaccgaaattgtgattcatttcaaaaccacaccacatccggtatttagccaaaaagcaccagaaaacaaattaattatccgtattcaacccgatgaagcgatttcgatgcgttttggtttgaaaaaaccgggagcaggttttgaagcaaaagaagtgtcgatggatttccgttatgcggatcttgcctcaccaagcttactgaccgcttatgagcgtttattattggattctatgaaaggcgatgccactttgtttgcgcgtactgatgcggtacatgcctgttggcagtttgtggagccgattttacaatataaagcacaaaatgggcgtgtttatgagtatgaagccggtacttggggaccgacagaagccgacaaactgatcgcgaaaacgggtcgtgtttggcgtaaaccaagtggattaatgaaaaagaaagtgtaa

SEQ ID NO: 242 - protein, 496 aa, Pasteurella multocida
MKIEADNNCIVIFGASGDLTYRKLIPALYNLYKIGRLTEHFSVLGVARTELSDEGFREKMRQALIKSEKANGETLDQFCSHLYYQALNTADAADYGKLIPRLDDLHDKYQTCGNTLYYLSTPPSLYGVIPECLAAHGLNTEEFGWKRLIVEKPFGYDIRTAKELDIQIHRFFDEHQIYRIDHYLGKETVQNLLVLRFSNGWFEPLWNRNFIDYIEITGAESIGVEERGGYYDDSGAMRDMFQNHLLQVLAMVAMEPPAIINADSMRDEVAKVLYCLHPLSEDDLENHLVLGQYTAGTVEGEAVKGYLQEKGVPAESNTETYMALRCEIDNWRWAGVPFYVRTGKRLPSRVTEIVIHFKTTPHPVFSQKAPENKLIIRIQPDEAISMRFGLKKPGAGFEAKEVSMDFRYADLASPSLLTAYERLLLDSMKGDATLFARTDAVHACWQFVEPILQYKAQNGRVYEYEAGTWGPTEADKLIAKTGRVWRKPSGLMKKKV

SEQ ID NO: 243 - DNA, 1470 bp, Pseudomonas putida
  CDS (1)..(1470)
atggctgcgatcagtgtcgatccttgcacgtttgccctgtttggcgcccttggcgacctggcgttgcgcaagctgtttcctgcgctctaccagctcgaccgggccaacctgctgcacccggacacccgcctgctggcgctggcccgcgaggcaggcagcgcgcaggagcacctgaacagcatcgaagcccacctgcgccggcatgtgcccgaggccgatatcgagcctgctgcattgggccgcttcctggcccggttgagctaccagcacctggacttcctgcaacctgagggttaccgggccctggccgagcagttgccgggcgacctgccgctgatcgcctacttcgccacggcggcagcggtgtacggggccatctgcgaaaacctcgacaacgccgggctggccccgcgtacccgggtggtgctggagaagcccatcggccacgacctggagtcgtcgcgacgggtcaacgatgccgtggcgcggttcttccccgaaaaccgggtgtaccgtatcgaccactatctgggcaaggagacggtgcagaacctgattgccctgcgcttcgccaatagcctgttcgaaacccagtggaaccagaattccatctcccacgtggagatcaccgttgccgagaaagtcggtatcgaaggccgctggggctacttcgacaaggccggccaactgcgcgacatgatccagaaccatctgctgcagttgctgtgcctgatcgccatggacccgcccagcgagctgtccgccgatgccattcgtgacgagaaggtgaaggtgctaaaggccctggcgccgatcacgggcgagggtttgagcacccaagtggtgcgtggtcagtatattgccggctacagcgagggcaagccggtacctggctacctggaagaggacaacgccaacgcccgcagcgacaccgaaaccttcgtcgccctgcgtgccgatatccgcaactggcgctggtcgggcgtgccgttctacctgcgtactggcaagcgcatgccgcagaagctgtcgcagatcgtcatccacttcaaggaaacgccgcactacattttcgccccggaacagcgtttgcaaatcggtaacaagctgatcattcgcctgcaaccggacgaaggcatttctttacgggtgatgaccaaggagcagggcctggacaaaggcatgcaactgcgcagcggtccgttgcagcttaatttttctgacacctggcgcagtacgcggattccggatgcctacgagcgcctgttgctcgaagtgatgcgtggcaaccagaacctgttcgtgcgcaaggacgaaatcgaatatgcctggaagtggtgcgaccagttgatcgccggctggcgtaatgcgggcgatgcgcccaagccttacgcggcgggctcctgggggccgatgagctcgattgcattgattacacgcgatgggagggcgtggtatggggatatctga

SEQ ID NO: 244 - protein, 489 aa, Pseudomonas putida
MAAISVDPCTFALFGALGDLALRKLFPALYQLDRANLLHPDTRLLALAREAGSAQEHLNSIEAHLRRHVPEADIEPAALGRFLARLSYQHLDFLQPEGYRALAEQLPGDLPLIAYFATAAAVYGAICENLDNAGLAPRTRVVLEKPIGHDLESSRRVNDAVARFFPENRVYRIDHYLGKETVQNLIALRFANSLFETQWNQNSISHVEITVAEKVGIEGRWGYFDKAGQLRDMIQNHLLQLLCLIAMDPPSELSADAIRDEKVKVLKALAPITGEGLSTQVVRGQYIAGYSEGKPVPGYLEEDNANARSDTETFVALRADIRNWRWSGVPFYLRTGKRMPQKLSQIVIHFKETPHYIFAPEQRLQIGNKLIIRLQPDEGISLRVMTKEQGLDKGMQLRSGPLQLNFSDTWRSTRIPDAYERLLLEVMRGNQNLFVRKDEIEYAWKWCDQLIAGWRNAGDAPKPYAAGSWGPMSSIALITRDGRAWYGDI

SEQ ID NO: 245 - DNA, 1566 bp, Trypanosoma brucei
  CDS (1)..(1566)
atgcagaattgtagaaaggttgcagacactctcaggaaggattcatgcgacatcatcccggatgctgctgcacctgaattgaaggaaagagcacttactattgtcgtgcttggggcaagcggtgacttggcgaggaataaaacgttcccggcgctgtttcaactattctgtaacggattaattccgcgaacgattaacattgtcggctacgctcgcaccaaaatgcctgacgtggagcaatggaaaaaagagagcctagctaagcattttcctcgggctaaggatcgctgcccccatattgaggctttcttgaagacaatcacctatatctcgggctcgtatgacggtgcggatgatttttttcgtcttaacgacgtgataacaaaatttgaggagtcgtttccaggaaaacagaaaggaggcaacaggttgttctaccttgcgttaccaccttctgtatttatgcatgcgtgcacggggattcgcactcatgtgatgcagaaaccgggcctggggtgggttcgaataattattgaaaagccattcgggcacgacacggaaagttctaatgaactttcgaggcagttggagcctcttttcgaagaatcccaaatttttcgaatcgatcattatcttgggaaggaaatggtgcaaaatattgttgtcacccgcttcgccaaccgtgttttcagtgcactatggaacaataataacatcgcgtgcgtccggatcacttttaaggagtctatcgggacggagggccgcggtggttactttgacaaggcgggtattatccgcgacgtggtgcaaaaccaccttacccagatcctttcactgttagcaatggagaaaccacgctcactaagcccagaggatatacgtgatgaaaaggtaattgtactaaggcatgtgaatcccgtgactcccgccgactgcgtgttgggacagtacacgaggtctgaagacggttctattcctggttacctggaggatccaacggtgccgaggggaagtaaatgcgcgacattcgtggtacttcgactgttcattaacaacgaccgctgggacggtgtgccattcatcatagaggcggggaaagcggtggagcggcgctatctcggcatacgcatccagtttaaggatgaaatccgcccctttggagttgccgcacagcgcaacgaactgatcatacgagcgcagccctcggaggcaatgtatttgagacttaccgcaaaaacacccggcgttctctcagacactcaccagaccgaacttgacctctcctacgaacatcgttacaacataactctgccagatgcctatgagagcctcattcacgaagcacttctggggaggtccaccaatttcgttcgaaaggatgaactcgatgccgcgtggaggatctacacaccactcttggaggctattgaacgtggagaaaccacaacgtacccctactccgctgggtcaaaggggccggcggaagcacaaaagtttgttgatgacactgggtttaaacctctcacaggggatatttaccagcagcggaagcttcatcatttgtaa

SEQ ID NO: 246 - protein, 521 aa, Trypanosoma brucei
MQNCRKVADTLRKDSCDIIPDAAAPELKERALTIVVLGASGDLARNKTFPALFQLFCNGLIPRTINIVGYARTKMPDVEQWKKESLAKHFPRAKDRCPHIEAFLKTITYISGSYDGADDFFRLNDVITKFEESFPGKQKGGNRLFYLALPPSVFMHACTGIRTHVMQKPGLGWVRIIIEKPFGHDTESSNELSRQLEPLFEESQIFRIDHYLGKEMVQNIVVTRFANRVFSALWNNNNIACVRITFKESIGTEGRGGYFDKAGIIRDVVQNHLTQILSLLAMEKPRSLSPEDIRDEKVIVLRHVNPVTPADCVLGQYTRSEDGSIPGYLEDPTVPRGSKCATFVVLRLFINNDRWDGVPFIIEAGKAVERRYLGIRIQFKDEIRPFGVAAQRNELIIRAQPSEAMYLRLTAKTPGVLSDTHQTELDLSYEHRYNITLPDAYESLIHEALLGRSTNFVRKDELDAAWRIYTPLLEAIERGETTTYPYSAGSKGPAEAQKFVDDTGFKPLTGDIYQQRKLHHL

SEQ ID NO: 247 - DNA, 1904 bp, Triticum aestivum
  CDS (153)..(1682)
aattcgattgccacccccctccccattcctacccacccagcatctcggcagtaactctcctccctcccacgcggcgcgcccgctcgccgcgcgcgcgaatctcggtcgcaactggtgtactgttgaaggaaggaaaaatcatcctatttgtcatggcgggaactgactcctcggcgtcatcgagacaaagcagtttcaactcattagcaaaggacctagaacttcctttggagaaagggtgcctcaccatcgttgtacttggggcttctggagatcttgccaagaagaaaacgttcccggcactctaccacctttttgagcaggggttcttacaatctggtgaagtgcatatagtggggtatgcgagaacaaatctttctgatgatgggttgagagggcgcatccgtgcataccttaaaggagcctcagaggaacatgtttcagaattcttgcaattgataaaatatgtcagtggttcctatgacagtggagaaggttttgaaaaactgaacaaggaaatatcagattatgagatgtcaaacaactcaggaagctcccgtaggctcttttatttggcattgcctccatctgtctacccttcagtgtgcaaaatgatccgaacatattgcatgagtccaacttctcgcgctggatggactagagtaattgttgagaagccctttggaaggggcctggactctgcagaagaattgagttcccaacttggggagctattcgaggaagatcaactctacaggattgaccactacttgggaaaagagttggtccaaaacttgcttgtgcttcgttttgcgaaccgtttgttcttaccactttggaaccgtgacaatgttgataatatacagattgtattcagggaggacttcggaactgatggacgtggaggatattttgatcaatatggaatcatccgtggtatcattcagaaccatttgttgcaggttttctgtttggttgcaatggaaaagcctgtatctcttaagcctgagcacatcagagatgagaaagtcaaggttctgcaatccgtgaacccgataaaggacgaagaggtagtccttggacaatatcagggctacaaggaggaccctacagtgccagatgactctaacaccccaacgtttgcatctattgtacttagggtacacaatgaaagatgggaaggtgttcctttcattcttaaagctggtaaagcattaaactcaagaaaagcagaaattcgtgtgcagttcaaggatgttcccggtgacatttttaaatgtaagaagcagggaagaaatgagtttgtcatacgcctccagccatcagaagccatgtacatgaaactaactgtgaagaaacctggattggaaatggctactgaacagagtgaacttgatctgtcatatgggatgcgttaccaagatgtcaaaattccagaggcatacgagcgcctcattttggatacaataagaggagaccagcaacactttgtgcgccgagatgagctgaaggctgcctggcagatcttcactcccttgttgcacgacatcgacgctggcaagctgaaggctgtttcatacaagcctggcagccgaggccccaaggaagctgatgaactgagtgagaaggttgggtacatgcagacccacggttacatctggataccacccacccttgcatagagtgcctccctcgatccttgtaggtttgtttagctaggaagagtgaaagtatcacggataaaaatcttacgaattttagctgtactgcggtttacctggcgttgtaataacggatctgttcgacggagtatacctcaccacggtgtgaaataaaaaatggagtgtttcaatcaaaaaaaaaaaaaaaaaaaagagtcgcgcgatcgatgccaatcactagtg

SEQ ID NO: 248 - protein, 509 aa, Triticum aestivum
MAGTDSSASSRQSSFNSLAKDLELPLEKGCLTIVVLGASGDLAKKKTFPALYHLFEQGFLQSGEVHIVGYARTNLSDDGLRGRIRAYLKGASEEHVSEFLQLIKYVSGSYDSGEGFEKLNKEISDYEMSNNSGSSRRLFYLALPPSVYPSVCKMIRTYCMSPTSRAGWTRVIVEKPFGRGLDSAEELSSQLGELFEEDQLYRIDHYLGKELVQNLLVLRFANRLFLPLWNRDNVDNIQIVFREDFGTDGRGGYFDQYGIIRGIIQNHLLQVFCLVAMEKPVSLKPEHIRDEKVKVLQSVNPIKDEEVVLGQYQGYKEDPTVPDDSNTPTFASIVLRVHNERWEGVPFILKAGKALNSRKAEIRVQFKDVPGDIFKCKKQGRNEFVIRLQPSEAMYMKLTVKKPGLEMATEQSELDLSYGMRYQDVKIPEAYERLILDTIRGDQQHFVRRDELKAAWQIFTPLLHDIDAGKLKAVSYKPGSRGPKEADELSEKVGYMQTHGYIWIPPTLA

SEQ ID NO: 249 - DNA, 1924 bp, Triticum aestivum
  CDS (161)..(1702)
cgattgggcaaggaaggggccacccccctccccattcctacccacccagcatctcggcagtaactctcctccctcccaccggcgcgcccgctcgccgcgcgcgcgaatctcggtcgcaactggtgtactgttgaaggaaggaaaaatcatcctatttgtcatggcgggaactgactcctcggcgtcatcgagacaaagcagtttcaactcattagcaaaggacctagaacttcctttggagcaagggtgcctcaccatcgttgtacttggggcttctggagatcttgccaagaagaaaacgttcccggcactctaccacctttttgagcaggggttcttacaatctggtgaagtgcatatagtggggtatgcgagaacaaatctttctgatgatgggttgagagggcgcatccgtgcataccttaaaggagcctcagaggaacatgtttcagaattcttgcaattgataaaatatgtcagtggttcctatgacagtggagaaggttttgaaaaactgaacaaggaaatatcagattatgagatgtcaaacaactcaggaagctcccgtaggctcttttatttggcattgcctccatctgtctacccttcagtgtgcaaaatgatccgaacatattgcatgagtccaacttctcgcgctggatggactagagtaattgttgagaagccctttggaagggacctggactctgcagaagaattgagttcccaacttggggagctattcgaggaagatcaactctacaggattgaccactacttgggaaaagagttggtccaaaacttgcttgtgcttcgttttgcgaaccgtttgttcttaccactttggaaccgtgacaatgttgataatatacagattgtattcagggaggacttcggaactgatggacgtggaggatattttgatcaatatggaatcatccgtgatatcattcagaaccatttgttgcaggttttctgtttggttgcaatggaaaagcctgtatctcttaagcctgagcacatcagagatgagaaagtcaaggttctgcaatccgtgaacccgataaaggacgaagaggtagtccttggacaatatcagggctacaaggatgaccctacagtgccagatgactctaataccccaacgtttgcatctattgtacttagggtacacaatgaaagatgggaaggtgttcctttcattcttaaagctggtaaagcattaaactcaagaaaagcagaaattcgtgtgcagttcaaggatgttcccggtgacatttttaaatgtaagaagcagggaagaaatgagtttgtcatacgcctccagccatcagaagccatgtacatgaaactaactgaattcgtgcaggtgaagaaacctggattggaaatggctactgaacagagtgaacttgatctgtcatatgggatgcgttaccaagatgtcaaaattccagaggcatacgagcgcctcattttggatacaataagaggggaccagcaacactttgtgcgccgagatgagctgaaggctgcctggcagatcttcactcccttgttgcacgacatcgacgctggcaagctgaaggctgtttcatacaagcctggcagccgaggccccaaggaagctgatgaactgagtgagaaggttgggtacatgcagacccacggttacatctggataccacccacccttgcatagagtgcctccctcgatccttgtaggtttgtttagctaggaagagtgaaagtatcacggataaaaatcttacgaattttagctgtactgcggtttacctggcgttgtaataacggatctgttcgacggagtatacctcaccacggtgtgaaataaaaaatggagtgtttcaaaaaaaaaaaaaaaaaagggtcgcgcgatcgatgccgaatcactagtgaattc

SEQ ID NO: 250 - protein, 513 aa, Triticum aestivum
MAGTDSSASSRQSSFNSLAKDLELPLEQGCLTIVVLGASGDLAKKKTFPALYHLFEQGFLQSGEVHIVGYARTNLSDDGLRGRIRAYLKGASEEHVSEFLQLIKYVSGSYDSGEGFEKLNKEISDYEMSNNSGSSRRLFYLALPPSVYPSVCKMIRTYCMSPTSRAGWTRVIVEKPFGRDLDSAEELSSQLGELFEEDQLYRIDHYLGKELVQNLLVLRFANRLFLPLWNRDNVDNIQIVFREDFGTDGRGGYFDQYGIIRDIIQNHLLQVFCLVAMEKPVSLKPEHIRDEKVKVLQSVNPIKDEEVVLGQYQGYKDDPTVPDDSNTPTFASIVLRVHNERWEGVPFILKAGKALNSRKAEIRVQFKDVPGDIFKCKKQGRNEFVIRLQPSEAMYMKLTEFVQVKKPGLEMATEQSELDLSYGMRYQDVKIPEAYERLILDTIRGDQQHFVRRDELKAAWQIFTPLLHDIDAGKLKAVSYKPGSRGPKEADELSEKVGYMQTHGYIWIPPTLA

SEQ ID NO: 251 - DNA, 2098 bp, Solanum tuberosum
  CDS (27)..(1775)
cacgagcttctctgatttctcaagatatggtaaccctttattcttccccttccactaactgttctggggccttttcatcatactccaattcttctattgggttctacaattatcattacaacttccctatttcatccagaaagtttggttctcacaagatttctttgcaaattaatgccgttcgcatgcaagatggtgctgtagtggctcaacctagcaaaacccaagatgaaactcctttgaagaaattaaaagatggaattttgtcaaaggagcagaaacatacatttgattttgattgcaacaaagataaatcaactgtcagtattactgttgttggtgcttcaggagatcttgccaaaaaaaagatatttcctgcactttttgcactttattatgagggttgcttaccggagcatttcactatttttggctatgcccggagtaagatgtctgatgacgaactcaggaacatggtcagcaagacacttacttgcaggattgataagagggaaaattgtggtgaaaagatggaacagtttctagaaaggtgtttctaccatagtggacaatatgattcccaggaacactttgcagagcttgataaaaagctgaaagaacatgaggctggaaggttttccaatcgtctgttctacttgtccattccaccaaatatttttataaatgctgtacgatgtgcaagcctctctgcatcatctgctcatggatggactagagtcattgtagagaaaccctttggtcgggattctgaatcctctgctgcattaacaggagcacttaagcagtacttgaaggaagatcaaattttcaggattgatcactatttagggaaggagcttgtggaaaacctttctgtccttcgtttcttcaacttgatatttgaacccttatggtcaaggcagtatataaggaacgtgcagtttattttctctgaagattttggcactgaaggaaggggaggttattttgatcattatgggataattagagacattatgcaaaaccatttgcttcaaattcttgccctctttgccatggaaacacctgtcagtttggatgcagaagatatcaggaatgaaaaggtaaaagttctgcgttctatgagacctttacaactagatgatgttatcgtcgggcagtacaaaagtcacacaaaagggggtgttaactatcctggttataccgacgacaagactgtacccaaggacagtctaaccccaacttttgctgcagctgctcttttcatagataatgcaagatgggatggggtgcctttccttatgaaggctggaaaagctttacataccaggagtgcggaaataagagtacaattcaggcacgtgccgggaaatttatacaataagaactttggctcagatctagatcaggcaacaaacgagcttgttatccgtgttcaacctgatgaagctatatacctaaagatcaataacaaagttcctggtctaggaatgagactggatcgcagtaatcttaatctgctttactcagcaagatacgcgaaggagatccctgatgcatatgagcggctacttcttgatgccatagaaggtgaacgtaggctttttattcgcagtgatgaactggatgctgcgtggtctcttttcacaccagtgttgaaagaacttgagcataagaaaatagtaccggaaagctacccctatggaagtcgaggacctattggagcacattaccttgcagcacgatataaagtaagatggggtgatcttgcttagacaaagtaatttgccattgctatgagaaaccatatgtagccttacaacttcttctgcttagtatgttgcaaccaaatttgttagtgggattccagtatccagactaacaaagcttgaagttgcttactgtcaaggcatatgacaatagagaacacacagttggtaaaacaaaagaagaggagaatctgggttcattttgttatttcaaataaatcttttctattgcaccaacgcatatccattggtagcagcttttttcatgtagcatttagtataccttgttagaatctaataattcgaaaagtaaaaaaaaaaaaaaaaaa

SEQ ID NO: 252 - protein, 582 aa, Solanum tuberosum
MVTLYSSPSTNCSGAFSSYSNSSIGFYNYHYNFPISSRKFGSHKISLQINAVRMQDGAVVAQPSKTQDETPLKKLKDGILSKEQKHTFDFDCNKDKSTVSITVVGASGDLAKKKIFPALFALYYEGCLPEHFTIFGYARSKMSDDELRNMVSKTLTCRIDKRENCGEKMEQFLERCFYHSGQYDSQEHFAELDKKLKEHEAGRFSNRLFYLSIPPNIFINAVRCASLSASSAHGWTRVIVEKPFGRDSESSAALTGALKQYLKEDQIFRIDHYLGKELVENLSVLRFFNLIFEPLWSRQYIRNVQFIFSEDFGTEGRGGYFDHYGIIRDIMQNHLLQILALFAMETPVSLDAEDIRNEKVKVLRSMRPLQLDDVIVGQYKSHTKGGVNYPGYTDDKTVPKDSLTPTFAAAALFIDNARWDGVPFLMKAGKALHTRSAEIRVQFRHVPGNLYNKNFGSDLDQATNELVIRVQPDEAIYLKINNKVPGLGMRLDRSNLNLLYSARYAKEIPDAYERLLLDAIEGERRLFIRSDELDAAWSLFTPVLKELEHKKIVPESYPYGSRGPIGAHYLAARYKVRWGDLA

SEQ ID NO: 253 - DNA, 1924 bp, Dunaliella bioculata
  CDS (68)..(1840)
gaattcggcacgaggtgttcagcatcatcaacccttagctcgtgccctccaggcgttcgtttttctcatgttgggtggaaggcagttgggtatggacaagctgtcccggaagctgtccggtgctcaacctgttgcgaactactcgcgtcgcccgatttcgcgcccatttcgcgcagcgcctgttcctcgagtcgcgcagaattcccaagatgctgtgacccagaatggcagcgggacaagcgaggcacccacctcctggcagaacccagcactcaagaaggccatccccactgtggtttctctctcagatgaggctgcagccatggcagctgatgactggagccaatctagcttgtcggttgttgtggtgggcgccagcggcgacctggccaagaagaaaatttttcctgcactttttgcccttttctatgagggcctgctgccaccggacttccagctctttggatatgcacgcagcaagatgactgatgaggagttccgagacctcatcggcaacaccctgacgtgccgcattgatgccaggtcccgctgcgaagactcccaggccgccttcttgtcgcgctgcttctactgcccaggccagtatgatgcccctgagggctatgccaacttggacaagaagtgcaaggagcaggaggccctgactggcaagatggtagccaaccgcatgttcttcctgtccatccctcccaacgtgtttgtgcaagcagcaggcggcgcagccgacaactgctcttctcccaccggctggacgcgcgtcattgtggagaagccctttggcagggacagcgccagcagtgctgagcttggcaggggtctggccaggcatttgacagaggaccagatctaccgtattgaccactacctggggaaggagctgattgagaacctgacagtgctgcgcttttcaaaccttgtgtttgagcccttgtggagcaggcagtacatccgcaatgtgcaggtgatcttctcagaagactttggcactgaaggccgcggaggctacttcgaccggtacggcatcatccgcgatgtcatgcagaaccacttgctccagattgtggcattgttcgccatggagccaccggtgtccctggatggagaggccatccgtaatgagaaggtcaaggtcctgcagtctatgtctcaagtggcgctggaggatgtcacactgggccaataccgcggcaggtctggcgctggccgttccggtggtgctgatttgcctggctacctggatgatgcaacagtgcccaagggctccctgtgccccacctttgctgccattgcgctgcacatcaacaatgcacgctgggatggtgtgccattcctgctcaaggctggcaaggcgctgcacacgcgcggcgctgagatccgtgtgcagttcaggcatgtgcccggcaacattttcaagcacaaagtgggccccaacatcgacatgaccaccaacgagcttgtgatccgcattcagccgcgggagtccatctacctcaagatcaacaacaaggtccctggcttgggcatgcgcctggataccaccaagctggacctggtgtacaacgacgcatactccaaggagttgccagatgcgtatgagcgcctcctgttggatgtggtgaacggcgataagcgcttgttcatccgcgatgatgagctggagcaggcctggaacatctttaccccagtgctgcatgagatcgagcgcagaaaggtggcacctgagctgtacccctacggcagcagaggccctgtgggggcacactacttggctgccaagtacaacgtgcgctggggagacttgacggaggatgagatctgaggtgtgaggccctggaccgacctcatccctggtgttcaatggttacatcagacatgagggcacctcaacacaggggcattccga

SEQ ID NO: 254 - protein, 590 aa, Dunaliella bioculata
MLGGRQLGMDKLSRKLSGAQPVANYSRRPISRPFRAAPVPRVAQNSQDAVTQNGSGTSEAPTSWQNPALKKAIPTVVSLSDEAAAMAADDWSQSSLSVVVVGASGDLAKKKIFPALFALFYEGLLPPDFQLFGYARSKMTDEEFRDLIGNTLTCRIDARSRCEDSQAAFLSRCFYCPGQYDAPEGYANLDKKCKEQEALTGKMVANRMFFLSIPPNVFVQAAGGAADNCSSPTGWTRVIVEKPFGRDSASSAELGRGLARHLTEDQIYRIDHYLGKELIENLTVLRFSNLVFEPLWSRQYIRNVQVIFSEDFGTEGRGGYFDRYGIIRDVMQNHLLQIVALFAMEPPVSLDGEAIRNEKVKVLQSMSQVALEDVTLGQYRGRSGAGRSGGADLPGYLDDATVPKGSLCPTFAAIALHINNARWDGVPFLLKAGKALHTRGAEIRVQFRHVPGNIFKHKVGPNIDMTTNELVIRIQPRESIYLKINNKVPGLGMRLDTTKLDLVYNDAYSKELPDAYERLLLDVVNGDKRLFIRDDELEQAWNIFTPVLHEIERRKVAPELYPYGSRGPVGAHYLAAKYNVRWGDLTEDEI

SEQ ID NO: 255 - DNA, 1976 bp, Cyanidium caldarium
  CDS (46)..(1848)
cacgagcaccattttattttcttcttctcaacgtgtaagagcaatatgtggatacctctattcataactggtttttggaataccaatacatcttcatctcacttatggaaaacaaaatatacaaagggatggacaactcctttgtatttctctaaagtggacaagtcgttctttgctcctcgtttagcttctattcaagctgttcaaggagatttggataatatcgcccctcaatggaacgactcttcattagaaacaactcttcctataactaccaatgaacgtccagctattccaagacaacacttcagccacctcggagacactttagatcctagtttgatggactccgtcaagaaacgaaaacagagagcaaaagaagagcctttatgtattgttgttattggtgctagtggagacttggcaaagaagaaaacttttcctgctttgttttccttgtattatcacgatttgttaccaaaggactttctcattgtaggttatgctagaagacaaatgactcaagaagagtttagaaactctattatggaatcattgacttgtagagttatcgatggcccacagtgtcaacgaaagatggatgagtttctacccaaatgtcactatatgtcaggtatgtatgatagaactgaagattttgttcgattggatcaatttttgaacaactttgaacaatcatttcccaatactcgagtggatagactatattatttagctgttccttctcaagtatttgaaaatgtggtacatcatgttcatgaaagcggaagaacgcaacgaggttggaatcgcatcgtcatggaaaaaccatttggaaaagacattacttcttatctacagcttcgaaatagtcttcgcaattgtatttctgaagatgaaatataccgaattgatcactatttgggaaaggagttggtacaaaatttgatggttttacggtttgccaattatctatttgagcctttatggaatcgagaccatatagcttccattcaaattgtgtttaaagagaattttggtgtggaaggaagagctggatatttcgatgaatatggaattattagagatattatgcagaatcatttattacaagtgatggcattgttgggtatggaacaaccagtaactttacatgcggaagatattcgagatgaaaaggtaaaatttctacgctctatacgtcctttaaaagcatcagactttgtacttggtcaatatagagaccgtcagaatcctcaacgttcttatttatcggaacctggagtaatgaatgatagtcatactcctacttttgctgcttgtgtatttcaagtggataatagaagatggtcaggtgtaccatttcttatgaaggctggtaaggcattggatgaacgcaaggcagaaatacgtattcagtttcaatctgttcctggtggactattttctcaagtagtttcgtcacatcttccacataatgaattggtgattatagtacaaccagatgaagccatttatatgcgtattcttagcaaggcaccgggttttacttcgcgtttggaagaggcacgtttgaatctcttctatcgtacggcttgggaagatagtaaagatatacctgatgcctatgagagacttattctggatgtcatacatggtgagaaaagtttgtttattcgtgatgatgaattggaagtggcttggaatatatttactccttcattgaaggaaatggaaatggctcaagattcgtggaaacctattttgtacgattacggtggaagaggtccaatcgaaagtgattatttggctgccaaatatgcagtgcaatggagtgaaggtgattgatgttcatgtaaggataatatagaaagaactggaatccattcagttgcaatggcattcatggattcttcatgtttctatataaaatagttgttcgtctaaaaaaaaaaaaaaaaaaaaaaaaaaaaaaa

SEQ ID NO: 256 - protein, 600 aa, Cyanidium caldarium
MWIPLFITGFWNTNTSSSHLWKTKYTKGWTTPLYFSKVDKSFFAPRLASIQAVQGDLDNIAPQWNDSSLETTLPITTNERPAIPRQHFSHLGDTLDPSLMDSVKKRKQRAKEEPLCIVVIGASGDLAKKKTFPALFSLYYHDLLPKDFLIVGYARRQMTQEEFRNSIMESLTCRVIDGPQCQRKMDEFLPKCHYMSGMYDRTEDFVRLDQFLNNFEQSFPNTRVDRLYYLAVPSQVFENVVHHVHESGRTQRGWNRIVMEKPFGKDITSYLQLRNSLRNCISEDEIYRIDHYLGKELVQNLMVLRFANYLFEPLWNRDHIASIQIVFKENFGVEGRAGYFDEYGIIRDIMQNHLLQVMALLGMEQPVTLHAEDIRDEKVKFLRSIRPLKASDFVLGQYRDRQNPQRSYLSEPGVMNDSHTPTFAACVFQVDNRRWSGVPFLMKAGKALDERKAEIRIQFQSVPGGLFSQVVSSHLPHNELVIIVQPDEAIYMRILSKAPGFTSRLEEARLNLFYRTAWEDSKDIPDAYERLILDVIHGEKSLFIRDDELEVAWNIFTPSLKEMEMAQDSWKPILYDYGGRGPIESDYLAAKYAVQWSEGD

SEQ ID NO: 257 - DNA, 1777 bp, Mesembryanthemum crystallinum
  CDS (39)..(1589)
ccactacgaaatttctccgaactcaaattcttccaagaatggggtcaggcgagtggcacgtggaaaaaagatcgagcttgaagagtgaattatctaaagacataggagagtctgaaagttcacaagaatgtggctctctttctatcattgttctaggtgcctctggtgatcttgccaagaagaagaccttccctgctctgtttaatctttaccgccagggatttcttcctcccagtgaggttcacatatttggttatgcaaggtcaaagatgacagatgatgacttgagagatcgcatacgtggacatctgattcccaggaatgtaacagcggagatatctgaggatgttttgaactttctgcatctgattaaatatgttagtgggtcttatgacactgaggacggttttcacttgttagatgatgaaatatcaaagtatgagtgtcaaaagaacagccaggaacattctaagagactcttttatcttgctcttcctccatcagtatatccatcagtctgcagaatgataaagctttgctgtatgaataaatctgatcttgggtggactcggattgttgttgagaagccttttggaagagacttagaatcagcagaacaacttagtgctcagattggagagttgtttgatgagtcacagatttaccgaattgatcactatttggggaaggagttggtgcagaacttgctggtgatgcgcttcgcgaatcgtctttttctacctctctggaatcgggacaatattgcgaatgtgcagattgtcttcagggaagattttggaacacaaggtcgtggtgggtactttgatcaatatggaataatccgtgacattattcaaaaccaccttttgcaggttctttgtttagttgccatggagaagcctgtctcaatcaaaccagagcacattcgtgatgagaaagtgaaggttctccaagctgttaatctaataaaagatgaagaggttgttcttgggcaatatgaaggctacaaggatgatccaactgttcccgaagactcaaacactccgacatttgcgactatggttttgcggatacacaatgaaagatgggaaggtgttccatttatactaaaggcagggaaagcattgaattcacgaaaagcagaaatacgtgttcagttcaaagatgttcctggtgacatattcaaatgtaacaagcaggggagaaatgagtttgtaatacggctacagccttcagaagcactctatatgaagcttacggtgaagcagcctgggcttgaaatgtcaactatacaaagtgagctggatttgtcgtatgggcagcggtatcagggagtcgttattccagaggcctatgagcgtctgattctggacacgataaaaggcgatcaacaacattttgtccgtagagatgagttgaaggctgcgtgggagatctttactcctcttctacacagaattgataagggagaattcaagccaatttcatacaagcctggaactcgaggcccagcagaagcagatgagctactggcaaaggctggatacgttcaaactcatgggtacatctggattccacccaccttatagtcactcggaaaagctacacggattgaatcggccatcaaaatttgtgtttggatatagtttgagaaaagctcttcgtggtgctggtagctcttattgaaccttgacagtaatttgtcttgggtacactaaagctactacagttgtatgtaattcattttgctggtgtaataaaagtcatttccggtttt

SEQ ID NO: 258 - protein, 516 aa, Mesembryanthemum crystallinum
MGSGEWHVEKRSSLKSELSKDIGESESSQECGSLSIIVLGASGDLAKKKTFPALFNLYRQGFLPPSEVHIFGYARSKMTDDDLRDRIRGHLIPRNVTAEISEDVLNFLHLIKYVSGSYDTEDGFHLLDDEISKYECQKNSQEHSKRLFYLALPPSVYPSVCRMIKLCCMNKSDLGWTRIVVEKPFGRDLESAEQLSAQIGELFDESQIYRIDHYLGKELVQNLLVMRFANRLFLPLWNRDNIANVQIVFREDFGTQGRGGYFDQYGIIRDIIQNHLLQVLCLVAMEKPVSIKPEHIRDEKVKVLQAVNLIKDEEVVLGQYEGYKDDPTVPEDSNTPTFATMVLRIHNERWEGVPFILKAGKALNSRKAEIRVQFKDVPGDIFKCNKQGRNEFVIRLQPSEALYMKLTVKQPGLEMSTIQSELDLSYGQRYQGVVIPEAYERLILDTIKGDQQHFVRRDELKAAWEIFTPLLHRIDKGEFKPISYKPGTRGPAEADELLAKAGYVQTHGYIWIPPTL

SEQ ID NO: 259 - DNA, 1587 bp, Mus musculus
  CDS (31)..(1572)
atgcagtggcaactaaactaggaaaacatcatggcagagcaggtgaccctaagccggacccaagtgtgtgggatcctgagggaagagttgtaccaaaatgatgccttccaccaagctgatacacacatatttatcatcatgggtgcatcgggtgacctggccaagaagaagatctatcccaccatctggtggctgttccgggatggtcttctacccaaagaaaccttcattgtgggctatgcccgctcacaactcacagtggatgacatccaaaagcagagtgagcccttctttaaggccactccagaagaaagacccaagctggaggagttcttcacgcgtaactcctatgtagttggccagtatgatgatccagcctcctataagcacctcaacagctacattaatgccctgcaccaggggatgcaggccaaccatctattctacctggccttgccccccacagtctatgaagcagtcaccaagaacattcaagagacctgcatgagtcagacaggctttaaccgcatcatagtggagaaacccttcgggagagacctgcagagctccaatcaattgtctaaccacatctcctctcttttccgtgaagaccagatctaccgcattgaccactacctggacaaagagatggtccagaacctcatggtgctgaggtttgctaacaggatctttggccctatctggaatggagacaacattgtttgtgtgatcctcacatttaaagagccctttggtactgagggtcgtgggggctattttgatgaatttgggatcatcagggatgttatgcagagccacctcctgcagatgttgtgtctggtggccatggaaaagcctgctaccacagattcagatgatgtccgtaatgagaaggtcaaagtgttgaaatgtatctcagaggtggaaactgacaatgtgatccttggccagtatgtggggaaccccaatggagaaggagaagctgccaatggatacttagatgaccccacagtaccccgtgggtccacaactgccacctttgctgcagctgtcctctatgtgaagaatgaacggtgggatggggtacccttcatactgcgctgtggcaaagccctgaatgaacgcaaagctgaagtgagactgcaattccgagatataccaggcgacatcttccaccagaagtgcaagcgtaatgagctggtcatccgtatgcagcccaatgaggcagtatacaccacgatgatgaccaagaagcctggcatgttctttaaccctgaggagtcggagctggacctaacttatggcaacaaatacaagaatgtgaagctccctggtgcctatgaacgcctcatcctggatgtcttctgtgggtgccagatgcactttgtccgtactgatgaactcagggaaggctggcgtatcttcacaccactgctgcacaagattgaacgagaaaagccccagcccttcccctatgtatatggcagccgtggccccacagaggcagatgagctgatgaggagagtgggcttccagtacaagggtacctacaagggtactcacaagcactgagccctggaacttctg

SEQ ID NO: 260 - protein, 513 aa, Mus musculus
MAEQVTLSRTQVCGILREELYQNDAFHQADTHIFIIMGASGDLAKKKIYPTIWWLFRDGLLPKETFIVGYARSQLTVDDIQKQSEPFFKATPEERPKLEEFFTRNSYVVGQYDDPASYKHLNSYINALHQGMQANHLFYLALPPTVYEAVTKNIQETCMSQTGFNRIIVEKPFGRDLQSSNQLSNHISSLFREDQIYRIDHYLDKEMVQNLMVLRFANRIFGPIWNGDNIVCVILTFKEPFGTEGRGGYFDEFGIIRDVMQSHLLQMLCLVAMEKPATTDSDDVRNEKVKVLKCISEVETDNVILGQYVGNPNGEGEAANGYLDDPTVPRGSTTATFAAAVLYVKNERWDGVPFILRCGKALNERKAEVRLQFRDIPGDIFHQKCKRNELVIRMQPNEAVYTTMMTKKPGMFFNPEESELDLTYGNKYKNVKLPGAYERLILDVFCGCQMHFVRTDELREGWRIFTPLLHKIEREKPQPFPYVYGSRGPTEADELMRRVGFQYKGTYKGTHKH

SEQ ID NO: 261 - DNA, 1485 bp, Actinobacillus actinomycetemcomitans
  CDS (1)..(1485)
atgaaagcagaaaactgttgtattgtaattttcggcgcctccggcgatctcacttatcgtaaacttattccggctttatataacctctataaaattgatcgactgggtgaagatttctccgttctcggcgtggcacgtaccgaactgaatgacaaatcattccgtgagaaaatgcgccaaacgctgatcaaaaatgaaggcgcgaaaggcgagtgcttggagcaattttgcagccacctgtattatcaggcggtcaatacggcggacaaagcggattacgccaaactggttccgcgtcttgacgaactgcacgacacctatcgcaccgaaggcaacaccttgtattatctttccacgccgccgagcctatatggcgtgattccggaatgtttgggcgaacatggcttaaataaagaagatcgcggctggaagcgtcttattgtggaaaaaccgttcggttatgaccgtgaaaccgccgaagcgctggatattcaaattcaccgtttctttgaagaacatcaaatttaccgtatcgaccattatcttggtaaagaaaccgtccaaaacctgcttgtgttgcgcttttccaacggttggtttgagccgttgtggaaccgtaatttcattgattacattgaaatcaccggcgcggaatctatcggtgtagaagagcgtggcggctattatgacggttccggcgcgatgcgcgatatgttccaaaaccatttattacaagtgctggcaatggtggcgatggagccgccggtgattatcaacgccaattccatgcgtgacgaagtggcgaaagtgctgcattgtttgcgcccgttgacccaggaagacgtggagcataatctggtgttgggacaatatgtcgcaggcgaagtggacggcgaatgggtgaaaggctatttagaggaaaaaggcgtgccgccgtattccaccaccgaaacctacatggcgctacgctgtgaaatcgaaaactggcgttgggcgggcgtgcctttctacgtgcgcaccggtaaacgtctgccggcacgcgtcacggaaatcgtgattcacttcaaaaccaccccgcacccggtattcagccaaaatgcgccggaaaataaactgattatccgtattcaaccggacgaaggcatttctatgcgttttggcttgaaaaaaccgggcgccggctttgaagccaaagaagtgtcgatggatttccgctatgccgatcttgcgggtgccaccgtcatgaccgcttatgagcgtttattgcttgatgccatgaaaggcgacgcgaccctatttgcgcgtaccgatgccgtacacgccgcctggaaattcgttcaaccgattttgaactataaagcccaaggcggcagactttatgattacgaggccggcacctggggaccgacggcagccgataaactcatcgccaaaagcggtcgtgtatggcgccgcccaagcgggttgatgaagaaaaaagtgtaa

SEQ ID NO: 262 - protein, 494 aa, Actinobacillus actinomycetemcomitans
MKAENCCIVIFGASGDLTYRKLIPALYNLYKIDRLGEDFSVLGVARTELNDKSFREKMRQTLIKNEGAKGECLEQFCSHLYYQAVNTADKADYAKLVPRLDELHDTYRTEGNTLYYLSTPPSLYGVIPECLGEHGLNKEDRGWKRLIVEKPFGYDRETAEALDIQIHRFFEEHQIYRIDHYLGKETVQNLLVLRFSNGWFEPLWNRNFIDYIEITGAESIGVEERGGYYDGSGAMRDMFQNHLLQVLAMVAMEPPVIINANSMRDEVAKVLHCLRPLTQEDVEHNLVLGQYVAGEVDGEWVKGYLEEKGVPPYSTTETYMALRCEIENWRWAGVPFYVRTGKRLPARVTEIVIHFKTTPHPVFSQNAPENKLIIRIQPDEGISMRFGLKKPGAGFEAKEVSMDFRYADLAGATVMTAYERLLLDAMKGDATLFARTDAVHAAWKFVQPILNYKAQGGRLYDYEAGTWGPTAADKLIAKSGRVWRRPSGLMKKKV

SEQ ID NO: 263 - DNA, 1473 bp, Buchnera aphidicola
  CDS (1)..(1473)
atgattatagaaactaatcaagcttgcgatctagtgatttttggaacaaaaggagatttagcaagaagaaaattgttaccagctttatataaattagaaaaatctcaaaaaatacatccagatacacgtataattggtacaggtcgtgctgattggaatacagaagattatataaagatagtaaaaaaagcaataaaaatgtttttaaatgaaaaaattgatgaaaaaatttggaaaaaattacgttcacgtttaaattttttttatattgatgtatttcaagatcttcactttttagaattaaaaaatatattaaatcaaaaaaaaaacattattatttattattgtgcagttccttcaaatacatttaatgctatttttacaggattaggaaaagttaatttaaattcttttccatcaagaatcataatcgaaaaaccactcggtgtatctttagaaacatcaaaaaaaatcaataatcaaattgctaaatattttttagaatcgcaaatctttcgtattgatcactatcttggaaaagaatcaatattaaatcttttagcattacgtttctcaaattcatttttttttcatagttggaataataaaattattgatcatattcaaattactgtatctgaagaagttggtattgaaaatagatggaattattttgatcaaatgggacaaacacgagatatggtacaaaatcatctcctgcaaattcttacaatcgtttctatggataaaccaaaaaatattacacctgaaggcataagagatgaaaaattaaaaatattgcgttctcttaaaaaaattgacttaaatgaaattcatattaagacagcacgaggtcaatatgcatctggaattataaatggtaaaaaggtaccttcttacatagaagaaaatggtgcaaacaaacatagtaaaacagaaacatttgtttcaattaaagttgatattaataatgatcgatggtttggagttccattttatttaagaacgggtaaacgtttagcatataaatactctgaaatagttattgtctttaaaaaaatatctaagaacttgtttcaagaattcaataaaaatttatcacctaacaaattgattatacgtctagaacctaatgaaagtattaaaatatattttttaaataaagtaccaggactcagtaaggaatataaattaaaaagtgataaaatggaatttaattttaatataaataatactaaaaattttgtcgacgcttatgaaaggctattatttgaaagtatgagaggaatacaatcattatttgtatgtcgagaagaagtagaagaagcgtggaaatggattgatccaataataaacggttggaaaaaaacaaatataaatactgtacagttatataaatctggtacatgggggccaaaaagttcggacgaaatcattatgcgagatggtcgattttgggaaacatttaattaa

SEQ ID NO: 264 - protein, 490 aa, Buchnera aphidicola
MIIETNQACDLVIFGTKGDLARRKLLPALYKLEKSQKIHPDTRIIGTGRADWNTEDYIKIVKKAIKMFLNEKIDEKIWKKLRSRLNFFYIDVFQDLHFLELKNILNQKKNIIIYYCAVPSNTFNAIFTGLGKVNLNSFPSRIIIEKPLGVSLETSKKINNQIAKYFLESQIFRIDHYLGKESILNLLALRFSNSFFFHSWNNKIIDHIQITVSEEVGIENRWNYFDQMGQTRDMVQNHLLQILTIVSMDKPKNITPEGIRDEKLKILRSLKKIDLNEIHIKTARGQYASGIINGKKVPSYIEENGANKHSKTETFVSIKVDINNDRWFGVPFYLRTGKRLAYKYSEIVIVFKKISKNLFQEFNKNLSPNKLIIRLEPNESIKIYFLNKVPGLSKEYKLKSDKMEFNFNINNTKNFVDAYERLLFESMRGIQSLFVCREEVEEAWKWIDPIINGWKKTNINTVQLYKSGTWGPKSSDEIIMRDGRFWETFN

SEQ ID NO: 265 - DNA, 1473 bp, Buchnera aphidicola
  CDS (1)..(1473)
atgaaaaataaaaattcaggatatgatttagttatttttggagcaaaaggagatctatcttgtagaaaactactaccttcattatatcaattagaaaaaaaaaataaattatgtactcacactagaataataggcgtaggtcgcgctaattgggataaaattatttatactaatgtagtatataaatcattaattaaatttttaaatgaaacaataatcgaatctatttggaaaaaattttcgtctcggttagaattttgtaatttagatattaattgcttgcacaattttaaaaaattaaaacaaataattcaacaaaataataacattataattaattatctagctatgccacctcacacatttggaaatatttgtttaggattagaatcaataaatttaaatttagaacctacgcgtattataattgaaaaaccattaggttcttctttaaaaacatctataaatattaataacaaaattggaaaattttttaaagaaaaacaaatttttcgaatagatcattatcttggaaaagaaactatacaaaatttgttagcattcagattttcaaattcacttttttactataattggaataataaatttattgatcatgttcaaattactgtatcagaaacaattggagttgaaggaagatttaattatttcgatacagttggacaaattaaagatatggttcaaaaccatttattacaaatattgacgattactactatgtcgacaccaattgattgccatgaaaatagcataagggatgaaaaagtaaaaattttaaaatcattacgaccatttaacattaataatattcataaaaatgtaatattaggtcaatatacttcaggaataataaatcaaaaaaaagttaaatcttatttagatgaaactaataatcaagaatatcaaatgaataaatataccgaaacatttgtatctatgaaaatatatatcgataatgatcaatggtctggagtcccattttatttgcgtactggaaaacgacttccaaaaaaatgttcagaaatcgttattttttttaaaacacctcctttaaatatttttagtaaaaattacaatacgttatctaaaaataagttaatattatcgttacagcctaacgaagcgattaagatatatattttaaataaaaaaccaaaactaacttctcaatacaaattagatttaattactttagattttaattattcaaaattttataaaaaaatacagttatctgatgcatatgaaaaattgttattagaaagcatgaaaggaattcagtctctatttgttagacgagatgaagttgaattagcatggaaatggattgactctactttgcaatgtttacatctaaaacctagattaccagatctatatccagctggaacttggggacctgcacgttcgaaaactatgataaataatgatggttacgaatggaatgaataa

SEQ ID NO: 266 - protein, 490 aa, Buchnera aphidicola
MKNKNSGYDLVIFGAKGDLSCRKLLPSLYQLEKKNKLCTHTRIIGVGRANWDKIIYTNVVYKSLIKFLNETIIESIWKKFSSRLEFCNLDINCLHNFKKLKQIIQQNNNIIINYLAMPPHTFGNICLGLESINLNLEPTRIIIEKPLGSSLKTSININNKIGKFFKEKQIFRIDHYLGKETIQNLLAFRFSNSLFYYNWNNKFIDHVQITVSETIGVEGRFNYFDTVGQIKDMVQNHLLQILTITTMSTPIDCHENSIRDEKVKILKSLRPFNINNIHKNVILGQYTSGIINQKKVKSYLDETNNQEYQMNKYTETFVSMKIYIDNDQWSGVPFYLRTGKRLPKKCSEIVIFFKTPPLNIFSKNYNTLSKNKLILSLQPNEAIKIYILNKKPKLTSQYKLDLITLDFNYSKFYKKIQLSDAYEKLLLESMKGIQSLFVRRDEVELAWKWIDSTLQCLHLKPRLPDLYPAGTWGPARSKTMINNDGYEWNE

SEQ ID NO: 267 - DNA, 2049 bp, Ceratitis capitata
  CDS (60)..(1640)
ttaaagtgtaaactaaaacatttttaagttttaaacaaattatttgatttgctttaaatatggccactcagcatttcaccaatggcagcgccaccgacgatggggagaccgcactcgaacatatcatcaaatcattggagactccaacaatgaagtgcgagggtacacatttcgattcccatgtgccgcacacgtttgtcatctttggtgcttcgggtgatttggccaaaaagaaaatctatccaaccttgtggtggctttaccgtgataatttactgccgaaatcaactaaattctgcggttatgcacgttcgaagttaacgattgaggagttgcgggcgaagtgtcatcaatacatgaaggtgcaaccggacgagcaggcaaaatatgaggaattctggcagaatcatgactacgctgcgggtagctatgatcagcgcagtgattttgtggctttaaaagaacgtttgagcagtttggagagctgcaattgtagttgtaatcgcatattttatttggccttaccgccgtccgtctttgagcgagttactgtgaacattaaggacatttgtttggctgaacgcggctggaatcgcgttattatcgaaaaaccttttggtcgcgacgatgtcacttcaaagaaactaagcgatcatcttgcatcactcttccacgaggaccaactctatcgtatcgatcattatctgggcaaggaaatggtgcaaaatctaatgaccattcgctttgccaataaaattctcaactccacatggaatcgggaaaatatcgcctcagtgctgatcacattcaaggaacccttcggcacacaaggacgcggcggctactttgacgagtttggcattatacgcgatgtcatgcaaaatcacctgctgcaaatattgtctttggtcgccatggagaaacccacctcctgccagccggatgatatacgcgatgaaaaagttaaagtattgaaaagcattccagcacttacattggacgatatggttttgggtcaatatgtgggcaatccaaatggcgttggtgagcaacgcgaggggtatctcgacgatccgacagtgtcgaacgactccaacacacccacttacgcgcagggtgtattgcgtatcaataatgaacgttgggacggcgtacccttcatcttacgttgcggtaaagcgctggacgaacggaaagccgtggtgcgtatacaatatcgtgatgtgcctggcgatattttcgagggcaatagcaaacgtaatgagttagttatacgtgtgcaacccggcgaggcgttgtatttcaaaatgatgaccaaaagtccgggtataactttcgatatagaggagaccgagttggacttaacctatgagcatcgctacaaaaactcctacctgccagatgcctacgaacgtctcattttggatgtattctgtggttcgcaaatgcatttcgtgcgttccgatgagctgagcgaggcgtggcgcatcttcacgccggtcttgaatgaaatcgaaaacaacaaggttaaacccataccttatgtatttggttcacgtggtcccaaggaggcggatcagaagacgtcggagaataacttcaaatattacggttcctacaagtggattggaaagaaatagagtttggtgtggctaaacctatggcagcagtgtgcacctacgtacatacatatgtttgtatgtatgtagggggaccaatgaataagataaacgcgtagaaaagacaaatacttaagcgattgtataagcaatttgaagaaaatgattgtgtacatatgtacatacatatttgtatatttgtatatttgtatatttgtaaatgtactcgtagcttgtagttaatgatgtaatgaatggattgtgcgagcgacctctgagctttgtaccagagcatcgggtatacaataatactttttgttaaatggaataatggatttataaataagttttttaagccaattttttttttgctcaaaatgaaatacaaaataaaacctaaaggacaagtgtaaaaaaaaaaaaaaaaaaa

SEQ ID NO: 268 - protein, 526 aa, Ceratitis capitata
MATQHFTNGSATDDGETALEHIIKSLETPTMKCEGTHFDSHVPHTFVIFGASGDLAKKKIYPTLWWLYRDNLLPKSTKFCGYARSKLTIEELRAKCHQYMKVQPDEQAKYEEFWQNHDYAAGSYDQRSDFVALKERLSSLESCNCSCNRIFYLALPPSVFERVTVNIKDICLAERGWNRVIIEKPFGRDDVTSKKLSDHLASLFHEDQLYRIDHYLGKEMVQNLMTIRFANKILNSTWNRENIASVLITFKEPFGTQGRGGYFDEFGIIRDVMQNHLLQILSLVAMEKPTSCQPDDIRDEKVKVLKSIPALTLDDMVLGQYVGNPNGVGEQREGYLDDPTVSNDSNTPTYAQGVLRINNERWDGVPFILRCGKALDERKAVVRIQYRDVPGDIFEGNSKRNELVIRVQPGEALYFKMMTKSPGITFDIEETELDLTYEHRYKNSYLPDAYERLILDVFCGSQMHFVRSDELSEAWRIFTPVLNEIENNKVKPIPYVFGSRGPKEADQKTSENNFKYYGSYKWIGKK

SEQ ID NO: 269 - DNA, 1524 bp, Chlamydia muridarum
  CDS (1)..(1524)
atggaagaaataaaagaaatggggcccacattaccagcctgccctccttgtgtcatggttatttttggggctacaggagacttgactgcaaggaagctttttcccgctttatacaatttaacaaaagagggacggttatctgaaaactttgtttgcgtgggatttgccagaagacccaaatctcatgagcaatttcgtgaagaaatgagacaagctattcaaaatttctctcattcatcagaaattgatattcgtgtttgggagagccttgaacacagaattttctatcatcaggcgaatttttccgaagcagaagggtattcttctttaagatctttcttagagagcgtggatcaaaaatatgggacaaaaggaaatcgtcttttctacctctccactcctccagattatttccaagaaataatccggaacttgaacagacaccaactattttatcatgagcaaggagcccaacagccctggtctaggctaattatagaaaagccttttggagttgatttacaaactgctcaagagcttcagcaatgcattgatgctaatatcaatgaagaatctgtttatcgaatagatcattatcttgggaaagaaactgttcaaaatattctgaccatacgttttgctaatacgctattcgaatcttgttggaactctcaatatatagatcatgtacagattagtgttagtgaatcgattggtataggctctcgagggaacttttttgaaaagtctggcatgctaagggatatggtgcaaaatcacctgatgcaattactgtgtctacttactatggagcccccttctgaattttcttctgcagagatcaaaaaagaaaaaattaagattctaaaaaaaatccttcctattcgagaagaagacgtaattcgtggtcaatatggtgaaggagttgtgcaaggcgtttctgtttctggctacagagaagaagaaaatgttgatccaaattctttggtagaaacttacgtagccttgaaattattcattgataatcctcgctggaaaggggttcctttttatttacaagcagggaaacgtcttcctaaaaggacaacggatattgccgttatctttaaaaaatctagttacgacttgtttaattcagaaaattgccctctgtgccctttagagaatgatttgctcatcatccgcattcaaccagatgaaggagttgctctacaatttaactgcaaagttccagggacaaataaactcgttcgtcctgtgaaaatggatttccgttacgatagttattttaatacagttactccagaagcttatgaacgattgttgtgtgattgtatccttggcgataggacccttttcactagcaatgaagaagtcttagcatcttgggaactattttctcccttattggagcaatggtctaagatccgtcccattttccctaattatattgcaggatctttgcgcccgcaaggagctgatgagctattatctagagatggaagagcatggcgttcttactaa

SEQ ID NO: 270 - protein, 507 aa, Chlamydia muridarum
MEEIKEMGPTLPACPPCVMVIFGATGDLTARKLFPALYNLTKEGRLSENFVCVGFARRPKSHEQFREEMRQAIQNFSHSSEIDIRVWESLEHRIFYHQANFSEAEGYSSLRSFLESVDQKYGTKGNRLFYLSTPPDYFQEIIRNLNRHQLFYHEQGAQQPWSRLIIEKPFGVDLQTAQELQQCIDANINEESVYRIDHYLGKETVQNILTIRFANTLFESCWNSQYIDHVQISVSESIGIGSRGNFFEKSGMLRDMVQNHLMQLLCLLTMEPPSEFSSAEIKKEKIKILKKILPIREEDVIRGQYGEGVVQGVSVSGYREEENVDPNSLVETYVALKLFIDNPRWKGVPFYLQAGKRLPKRTTDIAVIFKKSSYDLFNSENCPLCPLENDLLIIRIQPDEGVALQFNCKVPGTNKLVRPVKMDFRYDSYFNTVTPEAYERLLCDCILGDRTLFTSNEEVLASWELFSPLLEQWSKIRPIFPNYIAGSLRPQGADELLSRDGRAWRSY

SEQ ID NO: 271 - DNA, 1536 bp, Emericella nidulans
  CDS (1)..(1536)
atgtccgccacgatagcccgcgccgaggagcagcagaatgggagcactgtcgaactcaaagatgacaccgtcattgtcgtactaggtgcctccggggatcttgcaaagaagaagactttcccagctctttttggcctttttcgcaacaagttccttcccaagggtatcaagatcgtcggatatgcccggacacagatggaccacaatgaataccttaagcgagtgcgctcatacattaagaccccgacaaaggagatcgaagagcaattgaacagcttttgcgagctttgcacatacatcagcggccaatacgaccaggatgactcattcaagaacctcgccaagcaccttgaggagattgagaaaaaccaaaaggaacagaacagagtcttttacatggcgttgccccccagcgttttcatcacagtctcagagcaactaaaacgcaactgctaccccaaaaatggtgtcgctcgtattattgtcgagaaacctttcggcaaggacctccagagctctcgtgatctccagaaggcccttgagcccaactggaaagaagaagagatcttccgtattgaccactacctcggcaaggagatggttaagaacatccttatcatgcgctttggcaacgagttcttcaatgccacctggaaccgccatcacatcgacaacgttcagatcacgttcaaggaaccattcggtacggagggccgtggaggttactttgatgaattcggcatcatccgtgacgttatgcagaaccaccttctgcaagttctcacactgcttgctatggagcgacccatctctttctccgccgaagacatccgtgacgagaaggttcgcgtcttgcgcgccatggaccccattcaacccaaggatgtcatcatcggccagtacggcagatcactagatggtagcaaacccgcatataaggaggatgatacagtgccacaggactctcgctgccccaccttctgtgcgctggtcgctcacatcaagaacgagagatgggatggtgttcctttcatcatgaaggcgggtaaagccctcaacgaacagaagaccgaaatccgtattcagttcaaggacgtcacttctggcatcttcaaggatatcccccgcaacgagcttgtcatccgtgtccaacccaacgaatctgtctacatcaagatgaactcgaaacttcctggactttccatgcagaccgtggttactgagctggatctcacctaccgtcgtcgattctccgacctcaagattcctgaagcctacgaatctttgatcttggatgctctcaaaggagaccactccaactttgtccgtgacgacgagctcgatgctagctggaggatgttcactcctctgctccactacctcgatgacaacaaggagatcatccctatggaatacccctacggttcccgcgggccctccgttcttgacgacttcaccgcttcctatggctacaagttcagtgatgctgcgggataccagtggccgttgacgcacactacgcctaacaggctgtag

SEQ ID NO: 272 - protein, 511 aa, Emericella nidulans
MSATIARAEEQQNGSTVELKDDTVIVVLGASGDLAKKKTFPALFGLFRNKFLPKGIKIVGYARTQMDHNEYLKRVRSYIKTPTKEIEEQLNSFCELCTYISGQYDQDDSFKNLAKHLEEIEKNQKEQNRVFYMALPPSVFITVSEQLKRNCYPKNGVARIIVEKPFGKDLQSSRDLQKALEPNWKEEEIFRIDHYLGKEMVKNILIMRFGNEFFNATWNRHHIDNVQITFKEPFGTEGRGGYFDEFGIIRDVMQNHLLQVLTLLAMERPISFSAEDIRDEKVRVLRAMDPIQPKDVIIGQYGRSLDGSKPAYKEDDTVPQDSRCPTFCALVAHIKNERWDGVPFIMKAGKALNEQKTEIRIQFKDVTSGIFKDIPRNELVIRVQPNESVYIKMNSKLPGLSMQTVVTELDLTYRRRFSDLKIPEAYESLILDALKGDHSNFVRDDELDASWRMFTPLLHYLDDNKEIIPMEYPYGSRGPSVLDDFTASYGYKFSDAAGYQWPLTHTTPNRL

SEQ ID NO: 273 - DNA, 1962 bp, Macropus robustus
  CDS (1)..(1548)
atggcagagcaggtggcactgagccggacccaagtgtgtggaattctccgggaagaattgtaccagggtgatgccttccaccagtcagacacacacatattcatcatcatgggagcctcgggtgacttagcaaagaagaaaatctaccctacaatctggtggctgttccgtgatgggcttctccccgaagacaccttcattgtgggctatgctcgctcaaacctcactgtggatgacatccgaaagcaaagcgagccctattttaaggccaccccggaagagaacctgaagctggaggagttcttctctcgaaattcctacgtggcaggccaatacgatgagccagcttcctttcagcgtctcaatgcccacatgaactccctgcatcatgggtcacaggccaaccgcctcttctacctggccttgccacccaccgtctatgaagctgtcactaagaacatcaaagagacttgcatgagccagataggttggaaccgggtcattgtggagaagccttttggaaaagatcttcagagctctgacaaactgtcaaaccacatttcctcactcttccatgaggaccagatctaccggatcgatcactacctgggcaaggaaatggtacagaacctcatggtgctaagatttggtaacaggatctttggaccgatctggaaccgagacaacattgcctgtgtcatcttcaccttcaaggagccctttggcactcttggccgagggggctattttgatgagtttgggatcattcgagacgtgatgcagaaccacctcttgcagatgctttgcctagtggccatggaaaaacctgcctccaccaactctgatgatgtccgggatgaaaaggtgaaggtcctgaagtgtatctcagaggtgagagcaactgatgtggtcttgggccagtatgtggggaacccagatggagaaggggaagccaccaaaggctatttggatgatcccacagtgccccggggctccaccactgccacctttgctgctgtggtcctctatgtggaaaatgaaagatgggacggagtcccctttatcctccgctgtggaaaggccctgaatgaacgcaaagcagaagtgaggttacagttccgggatgtggctggtgatatcttccagcgccagtgtaagcggaatgagctggtgatccgcgtgcagcccaacgaggctgtctacaccaagatgatgaccaagaagccagggatgttcttcaaccccgaagagtcagagctggacctgacctatggcaacagatacaaagatgtgaagctgcccgatgcttatgagcgccttatcctggatgtcttctgtggaagccagatgcactttgtgcgcagtgatgagcttcgggaagcctggaggatctttacgcccctgctgcaccacattgagaaggagaagacccagcccattgcctacgtctatggcagccgaggccctcctgaagcagacgaactgatgaagagagtgggcttccagtatgagggcacctacaagtgggtaaacccccacaagctctgaggcagcctggcagcccactagcttcctcccccttgtttcccatccccagcctccatgctcatccttttagccctttggcctcacttagggtctgtctctctgcccatcccctgttcatgttctactcaggcagaaactcttgggaccacaagaccaggagcccgtccctgggggagatggagggccccattgagagattccctgggccctttccactcccagaaggcccggggacccggccaccaacttctcagccctgtttacagctgcattaggtctgccattcagcagctaccagatacttcctcctgctttgagctcccagagccagctacattccaatagcagtcgctggaggtgtcctctgtttcccttcaggacagcagctttataaatacagagaattaccagtca

SEQ ID NO: 274 - protein, 515 aa, Macropus robustus
MAEQVALSRTQVCGILREELYQGDAFHQSDTHIFIIMGASGDLAKKKIYPTIWWLFRDGLLPEDTFIVGYARSNLTVDDIRKQSEPYFKATPEENLKLEEFFSRNSYVAGQYDEPASFQRLNAHMNSLHHGSQANRLFYLALPPTVYEAVTKNIKETCMSQIGWNRVIVEKPFGKDLQSSDKLSNHISSLFHEDQIYRIDHYLGKEMVQNLMVLRFGNRIFGPIWNRDNIACVIFTFKEPFGTLGRGGYFDEFGIIRDVMQNHLLQMLCLVAMEKPASTNSDDVRDEKVKVLKCISEVRATDVVLGQYVGNPDGEGEATKGYLDDPTVPRGSTTATFAAVVLYVENERWDGVPFILRCGKALNERKAEVRLQFRDVAGDIFQRQCKRNELVIRVQPNEAVYTKMMTKKPGMFFNPEESELDLTYGNRYKDVKLPDAYERLILDVFCGSQMHFVRSDELREAWRIFTPLLHHIEKEKTQPIAYVYGSRGPPEADELMKRVGFQYEGTYKWVNPHKL

SEQ ID NO: 275 - DNA, 1530 bp, Nostoc punctiforme
  CDS (1)..(1530)
atggttagtctgctagaaaatcccttgcgcgttggtctgcaacaacaagggatgcctgaaccccagattatagttatctttggcgcttctggtgatctcacctggcgcaaactagtgccagcactttacaaattgcggcgagaacggcgcattccaccagaaactactattgttggcgtagcacgtcgagaatggagccatgaatacttccgcgaacaaatgcagaagggcatggaagaggcacatcctgatgtcgatttaggggaactctggcaagacttctctcaaggtctcttctacagtcctggagatatagacaaccctgaaagctaccagaaactaaaaaccttactgagtgaattagacgaaaaacggggcacgcgaggcaatcgcatgttctacctatcggttgccccttcattctttcccgaagcaattaagcagctaggaagcggcgggatgctagaagatccctacaaacatcgtctagtaattgaaaaaccctttggtcgggacttggcttctgcccaaagccttaaccaagtggtacagaaatattgcaaagagcatcaagtatatcgtattgaccactacttgggtaaagaaacagtccagaatttgctggtgttccgctttgccaatgcgatttttgaacccttgtggaatcgtcaattcgttgaccacgtgcaaattaccgtagcagaaaccgtgggcgtagaagaccgggctggctactatgaaagcgccggcgcactgcgggatatgttgcaaaatcacctcatgcaactttactgcttaacggcgatggaagcacccaacgcaatggatgccgacagcatccgcacagaaaaagtgaaggtactccaagctactcgtttagctgatgttcacaatctgtcgcggtcagcagtccgtgggcaatacagtgctggctggatgaaaggtcaagcagtgccaggatatcgcacagaaccaggcgttgaccccaactccaccacacccacttatgtagcgatgaagtttttggtggataactggcgctggaaaggtgttcctttctacttgcggactggaaagcggatgccgaaaaaagtgagtgaaattgcaattcacttccgcgaagttccatctcggatgttccaatctgccgctcaacagacaaacgccaatattttgacgatgcggattcagccaaatgaaggtatttccctgcgttttgatgtcaaaatgccgggggcagaattccgcacccgttccgttgatatggactttagttatggttcctttggcatccaagcaacatccgatgcctacgatcgcttattccttgattgtatgatgggcgatcaaacattgttcacacgtgcagatgaagtagaagcagcttggcaagtagtgacaccagccctttccgtttgggatgcacccgccgatcctactactattccccagtacgaagccgggacttgggagccagaacaagcagaactcttaattaaccaggatggccgtcgctggcgcagactctaa

SEQ ID NO: 276 - protein, 509 aa, Nostoc punctiforme
MVSLLENPLRVGLQQQGMPEPQIIVIFGASGDLTWRKLVPALYKLRRERRIPPETTIVGVARREWSHEYFREQMQKGMEEAHPDVDLGELWQDFSQGLFYSPGDIDNPESYQKLKTLLSELDEKRGTRGNRMFYLSVAPSFFPEAIKQLGSGGMLEDPYKHRLVIEKPFGRDLASAQSLNQVVQKYCKEHQVYRIDHYLGKETVQNLLVFRFANAIFEPLWNRQFVDHVQITVAETVGVEDRAGYYESAGALRDMLQNHLMQLYCLTAMEAPNAMDADSIRTEKVKVLQATRLADVHNLSRSAVRGQYSAGWMKGQAVPGYRTEPGVDPNSTTPTYVAMKFLVDNWRWKGVPFYLRTGKRMPKKVSEIAIHFREVPSRMFQSAAQQTNANILTMRIQPNEGISLRFDVKMPGAEFRTRSVDMDFSYGSFGIQATSDAYDRLFLDCMMGDQTLFTRADEVEAAWQVVTPALSVWDAPADPTTIPQYEAGTWEPEQAELLINQDGRRWRRL

SEQ ID NO: 277 - DNA, 1476 bp, Rhizobium meliloti
  CDS (1)..(1476)
atgagcagccagatcattcccgtcgaaccgtttgactatgtggtgttcgggggcaccggcgatcttgcggagcgcaagctgctgccggcactttatcaccgtcagatggaaggtcagttcacggaaccgacgcggatcatcggcgcatcgcgcgcgagcctttcccatgacgaataccgcaggttcgcgagcgacgccctgaaagaacacctgaagtccggggagttcaacgaggcggaagtcgagaaattcacctcgcgtctctattacgtctccgtcgacgccaagtccgagcagggctgggacgatctgaagaagctcctggaagagggcaaggatcgtacccgtgccttctatctcgccgtcgggccggcgattttcagcgacatttccgaaaagatccgcgatcacaagcttatcacgaggaacacccgcatcgtcgtcgagaagccgatcggccgcgacctcgcttccgcgacggagctcaacgacacgatcggcaaggtcttccgcgaagagcagattttccgcatcgaccactatctcggcaaggaaacggtgcagaatctgatggcactgcgcttcgccaacgcactttacgagccattgtggaattccgcccacatcgaccacgtgcagatcaccgtttccgaagccgtcgggctcgagaatcgcgcaggctactacgacaaggcgggcgcgctgcgcgacatggtgcagaaccatatcctccagcttctctgtttcgtcgcaatggaggcgccgacgtcgatggacgcggaggccgtgcgcgacgagaagctcaaggtgcttcgcgcgctgaagccgatcaccgcctccaatgtcgagcaggtgacggtccggggccaataccgcgcgggcgcatcgtccggaggcccggtcaagggctatctcgaagagctcgaaggaggcgtttccaacacggaaaccttcgtcgcgatcaaggccgagatcagcaattggcgctgggcaggcgtgcccttctatctgcgtaccggaaagcgcatggcgggccgcatgtcggagatcgtcatcaccttcaagcagatcccgcactcgatcttcgatcagagtgccggccggatttcggccaaccagctgatgatccgcctgcagccgaatgaaggcgtcaagcagtcgctgatgatcaaggatcccggaccgggcggcatgcggctgaggaacgtgcccctcgacatgagcttcgccgaggccttcgcggtccgcaatgccgatgcctatgaacgcctgttgctggacgtcatccgcaacaaccagaccctgttcgtgcgccgcgacgaagtggaagcggcctggcaatggatcgacccgatcctcaaggcctgggaagcaaccggacagcaggtgcaaggatataccgccggaacctggggcccgagccagtcgatcgcgctgatcgagcgcgacggccgcacttggaacgatgcgatctag

SEQ ID NO: 278 - protein, 491 aa, Rhizobium meliloti
MSSQIIPVEPFDYVVFGGTGDLAERKLLPALYHRQMEGQFTEPTRIIGASRASLSHDEYRRFASDALKEHLKSGEFNEAEVEKFTSRLYYVSVDAKSEQGWDDLKKLLEEGKDRTRAFYLAVGPAIFSDISEKIRDHKLITRNTRIVVEKPIGRDLASATELNDTIGKVFREEQIFRIDHYLGKETVQNLMALRFANALYEPLWNSAHIDHVQITVSEAVGLENRAGYYDKAGALRDMVQNHILQLLCFVAMEAPTSMDAEAVRDEKLKVLRALKPITASNVEQVTVRGQYRAGASSGGPVKGYLEELEGGVSNTETFVAIKAEISNWRWAGVPFYLRTGKRMAGRMSEIVITFKQIPHSIFDQSAGRISANQLMIRLQPNEGVKQSLMIKDPGPGGMRLRNVPLDMSFAEAFAVRNADAYERLLLDVIRNNQTLFVRRDEVEAAWQWIDPILKAWEATGQQVQGYTAGTWGPSQSIALIERDGRTWNDAI

SEQ ID NO: 279 - DNA, 1731 bp, Arabidopsis thaliana
  CDS (1)..(1731)
atggcgacacattctatgatcattccttctccttcttcttcttcctcgtctctcgctactgctgcgtctccgtttaaagagactctaccactctttagtagatctctcacattcccgagaaaatccttgttttctcaggttcgcttgagattcttcgccgagaaacattctcagcttgatacttcaaatgggtgtgccactaatttcgcttctttacaagattctggagatcaacttacagaggaacatgttacaaaaggagagtctactcttagtattacagttgttggagcgtcaggggacttagccaagaagaagatatttcctgcattgtttgctctcttttatgagggttgtcttcctcaggacttttctgtttttggttatgctcggactaaactcactcatgaagagcttcgtgacatgattagtagtactttaacttgccggattgatcagagggaaaaatgtggggataagatggagcagttcttgaaaagatgcttttaccattcgggtcagtataactcggaagaggattttgcggaactaaacaagaagctcaaagagaaagaggcaggaaagatatcaaacaggctgtactatttgtcgatacccccaaacatattcgttgatgtggttaggtgtgcaagtcttagagcctcctcagagaatggctggacaagggtcattgtggaaaagccatttggtcgtgactctgaatcatccggagagttaactagatgtctgaaacagtatcttacagaggagcaaatcttcaggattgatcactatttgggaaaggagcttgttgagaacctttcagtgctccgattctcaaatcttgttttcgagcctctgtggtcaagaaattacatacgcaacgttcagctgattttttctgaggatttcggaacagaagggcgtggaggttactttgatcaatatggaatcatacgagacatcatgcaaaaccatctcttgcaaatacttgcactttttgcaatggagacgccagtgagcttagatgctgaggacataagaagtgaaaaggtgaaagttttgagatcaatgaaaccgttgcggcttgaagatgtggttgttggtcaatacaaaggccataacaagggaggaaaaacttatccaggttatacagacgatccaacggttccaaatcacagtctcactcctacatttgctgcagcagccatgttcatcaacaatgcgagatgggacggtgttccttttcttatgaaagctggaaaagctctccataccagaggagcagagatcagagttcagttcagacatgtcccaggaaacttgtacaagaaaagttttgctactaatttagacaatgcaacaaatgaactagtgattagagttcagcctgatgaagggatatacctgaggatcaacaacaaagttcctggtcttggaatgagactagatcgcagcgaccttaaccttctatatcgatccaggtatccaagagagataccagatgcatatgaaagactgcttctcgatgcaatcgaaggagagaggaggttgtttatcagaagtgatgagctagatgcagcatgggatctattcacaccggctttgaaggaactagaggagaagaaaatcattcctgagctctatccatatggaagcagaggtcctgttggtgcacattaccttgcatctaagtacaatgtgagatggggagatcttggagaagcttaa

SEQ ID NO: 280 - protein, 576 aa, Arabidopsis thaliana
MATHSMIIPSPSSSSSSLATAASPFKETLPLFSRSLTFPRKSLFSQVRLRFFAEKHSQLDTSNGCATNFASLQDSGDQLTEEHVTKGESTLSITVVGASGDLAKKKIFPALFALFYEGCLPQDFSVFGYARTKLTHEELRDMISSTLTCRIDQREKCGDKMEQFLKRCFYHSGQYNSEEDFAELNKKLKEKEAGKISNRLYYLSIPPNIFVDVVRCASLRASSENGWTRVIVEKPFGRDSESSGELTRCLKQYLTEEQIFRIDHYLGKELVENLSVLRFSNLVFEPLWSRNYIRNVQLIFSEDFGTEGRGGYFDQYGIIRDIMQNHLLQILALFAMETPVSLDAEDIRSEKVKVLRSMKPLRLEDVVVGQYKGHNKGGKTYPGYTDDPTVPNHSLTPTFAAAAMFINNARWDGVPFLMKAGKALHTRGAEIRVQFRHVPGNLYKKSFATNLDNATNELVIRVQPDEGIYLRINNKVPGLGMRLDRSDLNLLYRSRYPREIPDAYERLLLDAIEGERRLFIRSDELDAAWDLFTPALKELEEKKIIPELYPYGSRGPVGAHYLASKYNVRWGDLGEA

SEQ ID NO: 281 - DNA, 2112 bp, Arabidopsis thaliana
  CDS (142)..(1932)
gatctcaaaaggttctcttatttgcagtatcgccccttaaatcctttttcgatgtttcttatgttcatcattattttttaactaaaaatctcatctttagacaacaattcaatttgccatctctctgttgtatctttgacgatggcggctttgtcttcctccgtcaccacccgatcatatcattccggttatttggcttctttctcaccggttaacggtgaccgacatcgatcactctcgttcctgtctgcttctcctcaaggattgaatcctcttgacctctgtgttagattccagaggaagtctggtcgtgcttctgtctttatgcaagatggtgcaatagtcactaattcaaattcatcagagagtaaaacttctcttaagggattgaaagatgaggtgctatcagctttatctcaagaagcagccaaggttggagtagaatctgatggtcaaagccagtcaacagttagtattacggtggttggagcctctggtgatcttgctaagaagaagattttcccggctcttttcgccctttactatgaaggttgtctccctgagcattttacaatatttggatattctaggagtaagatgacagatgttgaacttagaaacatggtcagcaaaaccctcacttgcagaattgataagagggcaaactgtggtgaaaagatggaagaatttctcaagagatgtttttaccattctggtcagtatgattctcaggaacattttactgaattggataagaagctcaaggaacatgaggctggaagaatctcaaaccgcctcttttatttgtctatccctccaaatatatttgtagatgctgtgaaatgtgcaagcacttctgcttcatctgtcaatggatggactagggttatcgtcgagaaaccttttggtcgagattctgaaacctcggctgctttaacgaaatccctcaagcagtatttggaggaagatcaaatttttaggatagaccattacctaggaaaggagctagtcgagaacttatctgttcttcgattctcaaaccttatatttgagccgctatggtcaaggcagtacataaggaacgtgcaatttatattttctgaggatttcggcactgaaggacgtggagggtactttgacaattacggaataataagagatataatgcagaatcatctgcttcaaatcttagccctctttgccatggaaacgcctgttagtttggatgcagaggatatcagaaatgaaaaggttaaggtgttacgttcaatgaggccaattcgagttgaagatgtggtaataggacaatacaagagccacacaaagggaggagtcacatatcctgcctacaccgatgataaaactgtaccaaaaggtagtctgactccaacatttgcagctgctgctcttttcatcgacaatgcaagatgggacggtgtgccctttttaatgaaagcgggcaaagcactacacaccaggagtgcagagataagggtgcagttcaggcatgttccggggaatttgtataaccggaatactggttctgatcttgatcaagctacaaatgagcttgtgatccgtgtccaaccagatgaagcaatctatttgaaaatcaacaacaaggtccctggtttaggaatgagattagatcgcagtaacttgaatcttctatactcagcaaggtattcaaaggagataccagatgcatatgagaggcttctgttagatgcaatagaaggagaaagaagattgttcataagaagtgacgagcttgatgcagcttggtcgctattcactccattgcttaaagagattgaagagaagaagagaatccctgagtactatccttatggtagccgtggtcctgttggtgctcattatctagctgctaaacacaaggtgcaatggggtgacgtcagtattgaccagtaaaacattttcttgtttgtattctcttttttttacattgataatagatttatctaggattcaagctttttctacgcctctttttacagctttaatttgtgcaatttggttatgtaccatttaataaataaataaaccaaaggggtttctcttattctctacaaggaaaatgtcttcttttta

SEQ ID NO: 282 - protein, 596 aa, Arabidopsis thaliana
MAALSSSVTTRSYHSGYLASFSPVNGDRHRSLSFLSASPQGLNPLDLCVRFQRKSGRASVFMQDGAIVTNSNSSESKTSLKGLKDEVLSALSQEAAKVGVESDGQSQSTVSITVVGASGDLAKKKIFPALFALYYEGCLPEHFTIFGYSRSKMTDVELRNMVSKTLTCRIDKRANCGEKMEEFLKRCFYHSGQYDSQEHFTELDKKLKEHEAGRISNRLFYLSIPPNIFVDAVKCASTSASSVNGWTRVIVEKPFGRDSETSAALTKSLKQYLEEDQIFRIDHYLGKELVENLSVLRFSNLIFEPLWSRQYIRNVQFIFSEDFGTEGRGGYFDNYGIIRDIMQNHLLQILALFAMETPVSLDAEDIRNEKVKVLRSMRPIRVEDVVIGQYKSHTKGGVTYPAYTDDKTVPKGSLTPTFAAAALFIDNARWDGVPFLMKAGKALHTRSAEIRVQFRHVPGNLYNRNTGSDLDQATNELVIRVQPDEAIYLKINNKVPGLGMRLDRSNLNLLYSARYSKEIPDAYERLLLDAIEGERRLFIRSDELDAAWSLFTPLLKEIEEKKRIPEYYPYGSRGPVGAHYLAAKHKVQWGDVSIDQ

SEQ ID NO: 283 - DNA, 1909 bp, Arabidopsis thaliana
  CDS (1)..(1878)
atgtctctctccagttgcttgcttcccttttctcaatcagcgacggctccgtcttcctccgtctgctcttgccatctcgccgcctctttttctaattttccggtttcgtcaagagactatagtttctccagaagtggaagccttgttctcaacggaggaggctcgaatctctgccggagattctgtggtttgaaactgtggatacttaagagcttgaatcgtagacaaggcaacaacagaaaacatcagcctgtaaacgagcttacaacacactcaaagcacactttcctcagcgatgatgaacgaggttttgctgaagaaactagagctgaagatttacgaccagaagagaatattctgggaacggatttgaatgatgggtttcacaatgttggagacttaccacctgtgtcaaaacaactctcggatgatctttcagatgttcgaagaagggcctcactttgcattgctgttgtaggagccactggtgagctagcaagagggaagattttcccggcattgtttgcgttgtattatagcggctaccttcctgaggatgttgctatatttggggtttcaagaaagaatctgacagatgaagacctcagatccatcattgcatcaacgctgacttgccgtgttgatcatcaggagaattgtgggggcaagatggatgcatttcagagtagaacatactatatcaatggaggttataataacagggatgggatgtcccgacttgccgagagaatgaaacagattgagggagaatcagaagcaaatagaatcttttacctctcagtacctcaagaagctctggtggatgtggcatgcaccattggagataacgctcaggcaccacgaggctggactcgaataatagttgagaaaccttttggttttaactcacattcgtctcatcagttaacaaagtcacttctctctaagtttgaagagaagcaaatctacaggatagatcacatgttaggaagaaacctcattgaaaatctgacagtgttaaggttttcaaatctagtttttgaaccactatggaacagaacatacatacgcaatatacaggttattatatcagaatcaattgcgcaaacagaaaagttttctgatggatatggaataatacgggacatagtgcacagccatatacttcagacaatcgcattacttgccatggaacctccgataagtctcgatggtgaagatatccgaaatgaaaaggtgaaggttttaagatcaattcgcaagatagacccgcgtgatgtcatccttggccagtataaatccagttcccgagacaagaacggtgtgatcttgaacggtgtagaccctacatattgtgcagcagccttgtatattgataatgcacgttgggatggtgtacctttccttgtaagagttggcactggcctcattaaacacagagtggagattcatgtgcaattccggcatgttcctggaaacctataccgagaaaatattggaataaacatagatttggggacaaatgagcttattctacgtgacgaacctgatgaggccatcctggtgaaaatcaacaacaaggttcctggtttaggtcttcagctagacgcttctgaacttaacttgctctataaagacaggtataaaaccgaagtaccagactcatatgaacacctaattcatgatgtaattgacggagacaatcatctgttcatgagaagcgatgaggttgcagcagcatggaacattcttagtccggttctagaagagatagacaagcatcacacagctccggagttgtatgaatttggtggacgaggaccagttgcggcatactatctttgggccaagcacggtgtcccatgggcagatgactgaagaagaaacatagatgcagcaacaaacaaat

SEQ ID NO: 284 - protein, 625 aa, Arabidopsis thaliana
MSLSSCLLPFSQSATAPSSSVCSCHLAASFSNFPVSSRDYSFSRSGSLVLNGGGSNLCRRFCGLKLWILKSLNRRQGNNRKHQPVNELTTHSKHTFLSDDERGFAEETRAEDLRPEENILGTDLNDGFHNVGDLPPVSKQLSDDLSDVRRRASLCIAVVGATGELARGKIFPALFALYYSGYLPEDVAIFGVSRKNLTDEDLRSIIASTLTCRVDHQENCGGKMDAFQSRTYYINGGYNNRDGMSRLAERMKQIEGESEANRIFYLSVPQEALVDVACTIGDNAQAPRGWTRIIVEKPFGFNSHSSHQLTKSLLSKFEEKQIYRIDHMLGRNLIENLTVLRFSNLVFEPLWNRTYIRNIQVIISESIAQTEKFSDGYGIIRDIVHSHILQTIALLAMEPPISLDGEDIRNEKVKVLRSIRKIDPRDVILGQYKSSSRDKNGVILNGVDPTYCAAALYIDNARWDGVPFLVRVGTGLIKHRVEIHVQFRHVPGNLYRENIGINIDLGTNELILRDEPDEAILVKINNKVPGLGLQLDASELNLLYKDRYKTEVPDSYEHLIHDVIDGDNHLFMRSDEVAAAWNILSPVLEEIDKHHTAPELYEFGGRGPVAAYYLWAKHGVPWADD

SEQ ID NO: 285 - DNA, 1548 bp, Arabidopsis thaliana
  CDS (1)..(1548)
atgggatctggtcaatggcacgttgagaaaaggtctacgtttaggaatgattcgtttgtgagagaatatggtatagttccagaaactggttgtctttcaatcatagttcttggtgcttctggtgatcttgctaagaagaagacttttcctgctctttttaacttataccgtcagggatttctcaatccagatgaagttcatattttcgggtatgcgaggactaagatttctgatgaagagctgagagataggattcgtggatatcttgttgatgagaagaatgctgagcaagctgaagctttgtcaaagtttctgcagctgattaagtatgtgagtggcccttatgatgctgaggaggggttccagagattagacaaggcaatttcagagcacgaaatctccaaaaatagtactgaagggtcttccagaagactgttttatcttgcacttccaccgtctgtttatccttctgtatgcaagatgatcaagacgtgctgcatgaacaaatctgatcttggtggatggacacggattgttgtggagaagccatttggcaaggaccttgaatctgcagagcaactgagttctcagattggagagttatttgatgaatcacagatctatcgtatagaccattatcttgggaaggaattagttcaaaacatgttggtcctccggtttgcaaatcgctttttcttgccactttggaaccgtgacaatatcgagaacgtgcagattgttttcagggaagattttggaactgaagggcgtggcggatattttgacgaatatggaataatccgtgatattattcaaaaccatctgctacaggttctttgccttgttgccatggagaaaccaatatctcttaaacctgagcatatccgggatgagaaagtgaaggtgcttcaatctgtggttccgataagcgatgacgaggtagttcttggacaatacgaaggatatagggatgatgatactgttccaaacgactcaaacactccaacatttgccacaacaatccttcgcatacacaacgaaagatgggaaggtgttccatttatattaaaggccggaaaagcgttgaattcaaggaaggcagaaattcgcattcaattcaaggatgtcccaggcgacatattcagatgtcaaaagcaaggaaggaacgagtttgtgatacgcttgcaaccttcagaggcaatgtacatgaaactaactgttaagcaaccaggtctagatatgaatactgtgcaaagtgaactagacttgtcgtatgggcaacggtatcaaggtgtcgctatccctgaggcatacgagcgcttaattcttgacacaatcaaaggcgatcaacaacatttcgttcgtagagacgaattaaaggttgcgtgggagatcttcacgccgctactccacaggatcgacaaaggagaagtaaagtcaatcccatacaaaccaggaagccgaggaccgaaagaagctgatcagctactagagaaagctggttatcttcagactcacggctatatctggatccctcctacactataa

SEQ ID NO: 286 - protein, 515 aa, Arabidopsis thaliana [sequence omitted]

SEQ ID NO: 287 - DNA, 1719 bp, Drosophila melanogaster
  CDS (1)..(1719)
atgcaatatctatcactaatcttttttaaattacaactatttattcttggccaaaatttgacgttaccttgctttcttttattctctcaaaattatacttcaattaaattacccgaaatgatttccatggacccccacaatgaggaggcgtattccatcgtggtcttcggagcctcaggcggattggccaaaaagaaggtgtttccggcgctttgggctctcttccgggagaatcggctgccccagggcaccaaaatatttactttcacccggtccccgctgcagacgaagacgtaccggttgcagattcttccctatatggagctggacaagcatcgggaccccaagaagtacaacctcttttggacgaccgtgcactgtgtgcagggcgagtacgacaagccggagaactacgtggcactcacggaggcgatggtacaccaggagacaaagcacaatcaggtgcgcgcgaatcgaatcttctacctggcgctgccaccgatcgttttcgatcaggtgaccctcaatgtcagtcgaaaatgcagctcgaccacgggatggaaccgcataatagtggagaagcccttcgcgcgggacgacatctcctacaaggcctttcaaacctcgctgtgcaactgcttccgggagtcgcagatttacctgatggaccacctcctcagccggcaggtgatgcagaacttctttgcgctgcgctactcaaaccacttgtgggccgagaccctgaaccaccgccacgtggcggcggtgatgatatccataaagtgtgagctgccggtgtcggtgaatcgggcagactactttaatcagtttggcattattcgcgacctgatgaccaaccacatgatccagatgctggccatgctggctatggatcagccgtacgccaacactgctgacgacctgcgtgccgaacggctgaaggttcttcgccaggtgctaactcccaacataggcgacgtcgtcttggctcaataccgcaacaaccggcgggagactgaccccgcgaagtgcggctacacggagcacacctacatcccgaaggactcctttacgcccacattcgctctggtggtgctgcacatcaacaaccgccgttggaccggggtacccttcattctcagagcgggaaaagccttgaacgacaccaagtcggaggtgcgtatccagtacaagccggtggactgcgacaccttccacagcgacagtactgacattcgtaacgagctagtcctgagatccttccccacggaagaggtctttatgcgcatgcgcctcaagcggcagggcgaggatatctgccttcgggagagcgagatcaacctgcgagtggatgatcggggaccgaagggactccaaggactgcccggctacctgctcaacgtgtttcaaggcgaccagacgctcttcatgcgctccgatgagcagtgcgagatttggcgcatattctcccccgttctcgccaccatcgattcggatcgtccccgcccgttgcactatgactttggatcacggggtcctttgctggcctatcgcaaggccgagcgcgctggcttcgtattcttcgccacggacgagtggcatcagagcgaagagacgttagaatacacggtcaagaatagcaagcagctaatcggaccccataccgccctcaagccagtaagagatcctcggtccaagaggtcgaattccaatccttag

SEQ ID NO: 288 - protein, 572 aa, Drosophila melanogaster
MQYLSLIFFKLQLFILGQNLTLPCFLLFSQNYTSIKLPEMISMDPHNEEAYSIVVFGASGGLAKKKVFPALWALFRENRLPQGTKIFTFTRSPLQTKTYRLQILPYMELDKHRDPKKYNLFWTTVHCVQGEYDKPENYVALTEAMVHQETKHNQVRANRIFYLALPPIVFDQVTLNVSRKCSSTTGWNRIIVEKPFARDDISYKAFQTSLCNCFRESQIYLMDHLLSRQVMQNFFALRYSNHLWAETLNHRHVAAVMISIKCELPVSVNRADYFNQFGIIRDLMTNHMIQMLAMLAMDQPYANTADDLRAERLKVLRQVLTPNIGDVVLAQYRNNRRETDPAKCGYTEHTYIPKDSFTPTFALVVLHINNRRWTGVPFILRAGKALNDTKSEVRIQYKPVDCDTFHSDSTDIRNELVLRSFPTEEVFMRMRLKRQGEDICLRESEINLRVDDRGPKGLQGLPGYLLNVFQGDQTLFMRSDEQCEIWRIFSPVLATIDSDRPRPLHYDFGSRGPLLAYRKAERAGFVFFATDEWHQSEETLEYTVKNSKQLIGPHTALKPVRDPRSKRSNSNP

SEQ ID NO: 289 - DNA, 1503 bp, Xenopus laevis
  CDS (1)..(1503)
atgagggaagaacttttaagcgaacaagagttccaccagtctgagacgcacatattcattgtcgttggagcttcgggagatctggccaaaaagaagatctaccccactctgtggtggctttacaacgatggtttgctcccagaagacacctacatagtaggctttgcacgttcaaagctgacagtgcaggatatcaaaaagcagagcgagccgtacttcaaggtatctgcagaggatgctttgaaacttgacacatttttcaagcgcaactcatatatttctggacaatactcagatgcagcctccttccaaaaccttaaccagcacctgaattcattacccaatggggcaaaagccaaccgcctcttctacctagcactaccacccagtgtgtatcatgatgttacccgcaacatcaaagagacctgcatgagctctgtaggatggaaccgtgttattgtggagaaaccttttggcaaagatctggaaagttccaatcgtttgtcggaacacatctcctccttatacaaggaaaaccagatctatcgtatcgaccattacctgggcaaagagatggtacagaacctcatgatcttaagatttggtaacaggatattcagccccctctggtccagggatcacataagtgcagtggttctgacatttaaagagcctttcggaacacaggggcgtggaggatactttgacgaatttggcatcatccgggatgtcatgcaaaatcacttgctccaaatgatgtgtttgatggctatggagaagccggtctccaccaactcggatgatgttagagatgaaaaggtgaaagtgttgaaatcagtggctcccctcaatcttgataatctggtaatagggcagtatattgggaatccggacggacaaggcgaggcacaagaaggctatttggatgaccgcactgttccaaaaggatctttgacccccacatttgccactgcagtcctatatgtgcagaatgagcgttgggatggtgtcccctttatcatgcgctgtggcaaggccttgaacgagaggaaggcagaggcacgactgcagtttcgtgatgtgcctggagatatattccaaggccaatgcaaaaggaatgaactggtgatcagagtgcagccaaatgaagctgtgtacaccaagatgatgaccaagaagccaggaatgttctttaaccctgaggagtcagagctagacttaacatatggcagcagatacaaggatgtgaagttgccagacgcatatgagcggcttattttggatgtgttctgtggaaatcagatgcactttgtacgcagtgatgaactgagagaagcttggaggatcttcacccctgttctccatcagctggagagagaaaaaatcaaaccccatccttataaatatggaagccgtgggcccgcagaaagtgacgagctaatgcagaaggttggcttccattatgcaggaacctacaaatgggtgaacccaaacaagctctga

SEQ ID NO: 290 - protein, 500 aa, Xenopus laevis
MREELLSEQEFHQSETHIFIVVGASGDLAKKKIYPTLWWLYNDGLLPEDTYIVGFARSKLTVQDIKKQSEPYFKVSAEDALKLDTFFKRNSYISGQYSDAASFQNLNQHLNSLPNGAKANRLFYLALPPSVYHDVTRNIKETCMSSVGWNRVIVEKPFGKDLESSNRLSEHISSLYKENQIYRIDHYLGKEMVQNLMILRFGNRIFSPLWSRDHISAVVLTFKEPFGTQGRGGYFDEFGIIRDVMQNHLLQMMCLMAMEKPVSTNSDDVRDEKVKVLKSVAPLNLDNLVIGQYIGNPDGQGEAQEGYLDDRTVPKGSLTPTFATAVLYVQNERWDGVPFIMRCGKALNERKAEARLQFRDVPGDIFQGQCKRNELVIRVQPNEAVYTKMMTKKPGMFFNPEESELDLTYGSRYKDVKLPDAYERLILDVFCGNQMHFVRSDELREAWRIFTPVLHQLEREKIKPHPYKYGSRGPAESDELMQKVGFHYAGTYKWVNPNKL

SEQ ID NO: 291 - DNA, 1545 bp, Mycobacterium paratuberculosis
  CDS (1)..(1545)
atgagcccggctcgcaccgcgcagcaatggcataacccgttacgcgacaagcgcgacaagcggctcccgcgcatcgccgggccgtgcggaatggtgatcttcggcgtcaccggcgatctggcccgcaagaaggtcatgcccgccatctacgacctggccaaccgcgggctgctgccgcccagcttctcgctggtcggcttcgcccgaagggattggagcacccaggatttcggcaaggtggtatatgaggccgtcaaggagcactgccgcaccccgttccggcaggagaactgggatcggctggccgagggattccgtttcgtgccaggcgctttcgacgacgacgaggcgttcggccggctcgccgagacgctggacaaactcgacgccgagcggggcaccggcggtaatcacgccttctacctggccatcccgcccaagtccttccccgtcgtgtgcgaacaactgcacaagtccgggctggcccgcccgcagggcgaccgctggagccgagttgtcatcgagaagccgttcggccacgacctggagagcgcgcagagcctgaacaaggccgtcaacgccgtctttcccgaggagtcggtcttccgcatcgaccactacctgggcaaggagacggtccgcaacatcctggcgctgcggttcgccaaccagttgttcgacccgatctggaactcgcactacgtcgaccacgtgcagatcaccatggccgaggacatcggcctgggcgggcgggccggctactacgacggcatcggcgccgcgcgcgacgtcatccagaaccacctgatgcagctgctggcgctgaccgcgatggaagagccggtcagcttcagcccgttggcgctccaggccgagaagatcaaggtactctcggccacccacctcgcccacccgctcgacgagaccaccagccgcggccagtacaccgcgggctggcagggcggcgagaaggtggtcgggctgctcgacgaggagggcttcgccaaggactcgatcaccgagacgttcgccgccatcaccctcgaggtggacacccgccgctgggcgggggtgccgttctacctgcggaccggaaaacgcttgggccgcagggtgaccgagatagccctggtgttcaagcgcgcgccgcatctgccgttcgacgcgacgatgaccgatgagctgggcgccaacgccatggtgatccgggtgcagcccgacgagggtgtcacgctgcggttcggttccaaggtgccgggcaccgcgatggaggtccgcgacgtcaacatggacttctcctacgggtcggcgttcgccgaggaatcaccggaggcctacgagcagttgatcctcgacgtgctgctgggtgagccgtccctgttcccggtcaacgccgaagtcgaattggcttggcacatcctcgatcccgtgctcgacaactgggcgagcggcggcaggcccgagccctacgaggccggcacctggggcccggattcggcgttcgagatgctgcaccggacgggccgcgaatggcggcggccatga

SEQ ID NO: 292 - protein, 514 aa, Mycobacterium paratuberculosis
MSPARTAQQWHNPLRDKRDKRLPRIAGPCGMVIFGVTGDLARKKVMPAIYDLANRGLLPPSFSLVGFARRDWSTQDFGKVVYEAVKEHCRTPFRQENWDRLAEGFRFVPGAFDDDEAFGRLAETLDKLDAERGTGGNHAFYLAIPPKSFPVVCEQLHKSGLARPQGDRWSRVVIEKPFGHDLESAQSLNKAVNAVFPEESVFRIDHYLGKETVRNILALRFANQLFDPIWNSHYVDHVQITMAEDIGLGGRAGYYDGIGAARDVIQNHLMQLLALTAMEEPVSFSPLALQAEKIKVLSATHLAHPLDETTSRGQYTAGWQGGEKVVGLLDEEGFAKDSITETFAAITLEVDTRRWAGVPFYLRTGKRLGRRVTEIALVFKRAPHLPFDATMTDELGANAMVIRVQPDEGVTLRFGSKVPGTAMEVRDVNMDFSYGSAFAEESPEAYEQLILDVLLGEPSLFPVNAEVELAWHILDPVLDNWASGGRPEPYEAGTWGPDSAFEMLHRTGREWRRP

SEQ ID NO: 293 - DNA, 1410 bp, Mycobacterium paratuberculosis
  CDS (1)..(1410)
atggccgacgatgacagccatccatccgacctgctggtgatcttcggaatcaccggggacttggcgcgcaagatgacgttccgcgcgctctaccggctggagcgccgcgaggagctcgagcacccgatcatcggcgtggccagcgacgacatcaccctcgaccagctgctggaccgcgcccgggaggcgatcaaggccaccggtgagacgttcgacgacgcggtgttcgaccgcttggcgggccggctgtcctacctgtcgggcgacgtcaccgacgccgggctctacagcgagctcgccaagaagatcggtggcgattcgcgtccgctgtactacctggagatgccgccgtcgttgttcgcgccgatcgtggagaacctggccaaggccgacctactggaacgcgccagggtggcggtggaaaagccgttcggccacgacctggaatctgcgcgcgacctcaacgcccggctgcgcgcggtgctcgacgaagaccaaatcctgcgcgtagaccactttttgggcaaacagccggtcgaagaactgcaatacctgcggttcgccaacaacgccctggccaagctgtgggaccgcgacagcatctccgaaatccacatcaccatggccgaggacttcggcatcgaggaccgcggcaagttctatgacgccgtgggggcggtgcgcgacgtcgtgcaaaaccatctgctgcaggtgctcgcgctggtcgccatggaacccccggtgggggcgggcgccgacgacctcaacgacaagaaggccgaggtgttccgggccatgccgtcgctggacccggagcactgcgtgcgtggccagtatcgcggctacaccgaagtccccggtgtggcaaaggattccaccaccgagacctacgtcgcgctgagggccgagatcgacaactggcgctgggccggggtgccgatcttcctgcgcgccggcaaggcgttgccgcacaaggtcaccgaggtccggatgttcctgcatcacgtgcccggcttctccttcctgcccaaccgccgcccgcccgagcccaaccagatcgtgctgcgcatcgaccccgatcccgggatgcgcctgcagctgtccgctcaggtcggcgactcgtggcacgacgtgcacctggactcctcgttcgcggtggacctcggcgaaccggtgcggccctacgaacggctgctctacgccgcgttcaacggcgaccgccagctgtttgcccgcgaggacgccatcgaagagacctggcggatcgtgcagccggtgctggacaagccgagccgcatccaccaatacgagcaaggctcctggggacccgaggccgcgcaggcgctggtgcacggtcgccacgcctggcagcaaccgtggctgccgcagagcacgtccacgaaacgataa

SEQ ID NO: 294 - protein, 469 aa, Mycobacterium paratuberculosis
MADDDSHPSDLLVIFGITGDLARKMTFRALYRLERREELEHPIIGVASDDITLDQLLDRAREAIKATGETFDDAVFDRLAGRLSYLSGDVTDAGLYSELAKKIGGDSRPLYYLEMPPSLFAPIVENLAKADLLERARVAVEKPFGHDLESARDLNARLRAVLDEDQILRVDHFLGKQPVEELQYLRFANNALAKLWDRDSISEIHITMAEDFGIEDRGKFYDAVGAVRDVVQNHLLQVLALVAMEPPVGAGADDLNDKKAEVFRAMPSLDPEHCVRGQYRGYTEVPGVAKDSTTETYVALRAEIDNWRWAGVPIFLRAGKALPHKVTEVRMFLHHVPGFSFLPNRRPPEPNQIVLRIDPDPGMRLQLSAQVGDSWHDVHLDSSFAVDLGEPVRPYERLLYAAFNGDRQLFAREDAIEETWRIVQPVLDKPSRIHQYEQGSWGPEAAQALVHGRHAWQQPWLPQSTSTKR

SEQ ID NO: 295 - DNA, 1874 bp, Oryza sativa
  CDS (9)..(1742)
ggctccaaatggccggcaccggcttacgattccggcagggcgccatcttcttctcaggagctcatgctgctgctcatccaagaacaaggactcctcaccaccattgctcacctcagaggacgcacgatgcgagaggaaggtgccgcctcacggctaagtccgcaaatggacgcccacagatcagtgcctccttcagagatgtggcgatagatggggcacagtctgaagatggggcgccagagcagggaggatccaccgtcagcatcaccgtcgtcggcgcctccggcgatctcgccaagaagaagatctttcccgcgcttttcgccctgtactacgaggactgcctcccggagcattttacagtttttggttatgctcgtagcaagatgagcgatgaagagctcaggaacatgattagcttgactctgacatgccggattgatcagagggagaactgcagtgacaagatggaacagtttctgaagagatgcttttatcaatctgggcagtacaattcagaggaagggttttctgaactggacagaaagctaaaagaaaaggaggctggcaaggtaccaaacaggctcttttacctgtcgattccaccgaacatatttgtcgatgtggtgagatctgctagtcgcacagcatcatctcaagacggatggacaaggttcatagtggagaagccattcggccgcgattccgagtcgtcaggggagctcactcgaaacttgaagaagtacttggccgaggagcagatattcaggattgaccattatttggggaaggagctggttgagaacctctcggtgctccgtttctccaatctcgtcttcgagccactgtggtcgaggaactacatcaggaatgtgcagctcatattttctgaagatttcggcacggagggtcgaggcggccacttcgacaactacgggatcatcagggacataatgcagaaccacctgctgcagatcctggccctgttcgccatggagactccggtcagcctcgacgccgaggacatccgcaacgagaaggtgaaagtgctgaggtcgatgaggcagctgaggctggaggacgtggtggtgggtcagtacaaggggcacagcaagggcgggaagacgtacccggcgtacgtggacgacccgacggtgccgagcggcagcatcacgccgacgttcgccgccgccgccctcttcatcgacaacgcccgctgggacggcgtccccttcctcatgaaggccggcaaggccctgcacacgcgacgggcggagatcagggtgcagttccggcgggtgccggggaacctgtacgggcggcggagccggagcgtgggcggcggcgggacgacagcgacgagggagctggagaaggcgacgaacgagctggtgctgcgggtgcagcccgacgaggcgatctacctcaagatcaacagcaaggtgcccgggctggggatgaggctggacagcagcgacctcaacctgctctactccgagcgctaccccgccgagatccccgacgcctacgagcgcctgctgctcgacgccatcgagggcgagcgccgcctcttcatccgcagcgacgagctcgacgccgcctgggccatcttcacccccgtcctcgccgacctcgaggccaacaaggtggcacccgagctctacccgtacggcagccggggacccgtcggagcgcactacctcgccgccaaccacaacgtccgctggggtgacattagctagctcagaaaatgaaaagatcgatcggagtcgctgttaccgtgcttgctataatcttcatttaccatttgcattgatgaattctttattggactgctcagggacgaaattaataaaacaaagctctagtcattc

SEQ ID NO: 296 - protein, 577 aa, Oryza sativa
MAGTGLRFRQGAIFFSGAHAAAHPRTRTPHHHCSPQRTHDARGRCRLTAKSANGRPQISASFRDVAIDGAQSEDGAPEQGGSTVSITVVGASGDLAKKKIFPALFALYYEDCLPEHFTVFGYARSKMSDEELRNMISLTLTCRIDQRENCSDKMEQFLKRCFYQSGQYNSEEGFSELDRKLKEKEAGKVPNRLFYLSIPPNIFVDVVRSASRTASSQDGWTRFIVEKPFGRDSESSGELTRNLKKYLAEEQIFRIDHYLGKELVENLSVLRFSNLVFEPLWSRNYIRNVQLIFSEDFGTEGRGGHFDNYGIIRDIMQNHLLQILALFAMETPVSLDAEDIRNEKVKVLRSMRQLRLEDVVVGQYKGHSKGGKTYPAYVDDPTVPSGSITPTFAAAALFIDNARWDGVPFLMKAGKALHTRRAEIRVQFRRVPGNLYGRRSRSVGGGGTTATRELEKATNELVLRVQPDEAIYLKINSKVPGLGMRLDSSDLNLLYSERYPAEIPDAYERLLLDAIEGERRLFIRSDELDAAWAIFTPVLADLEANKVAPELYPYGSRGPVGAHYLAANHNVRWGDIS

SEQ ID NO: 297 - DNA, 1449 bp, Lactobacillus johnsonii
  CDS (1)..(1449)
atgaaaaatattccagttgttatgattatttttggtggctccggagatttagctcatagaaagctttatccagccttatttaatttgtatcaaaaaggtttaattcatgatcattttgctgtaattggtacagcgagaagaccttggagccatgaatatttgcaagaacaagtagttgaagcagttaaagaaagctgtgacaactttgatgaaaaagaagcaaaagaattcgcttcacatttttattaccagtctcacgatgtaactgatattggccactacattgccttgaaggaattagcagctaaacttgatgaaaaatatcaagcagaaggaaatcgaattttctacatggctatggcaccaagattttttggtacaattgctactcacattaatgatcaaaaattgcttggtagcggctttaaccgtttagtaattgaaaagccatttggtcatgatttagcttcagcagaaaagttaaaccgagaaattggcgaaagttttgatgaagagtcggtatatcgaattgaccactatcttggaaaagaaatggttcaaaatattatgcctctaagaatgactaatccaattgttaagaatatctggaataatgactatatcgcaaatatgcaagtaactttagcagaaagtctaggagtaggaactcgtggtggttactacgaaacatctggtgctttacgtgatatggttcaaaaccatatttttcaaattattacacttttagctatgcctgagcctaaaggacttgattcagaccatattcaccaagctaaacaagaattattagatagtctagtaattccaactccagaaatggttaaaaagcatttctcacgaggacaatatttagctgatgataatgaagtagagtatttaaaggcagatcaagttgcactagactctaaagtagaaacatttgtagctggagaagttaaattcaaaaagggtccagtagctgatgtgccaatttactttagaactggtaagaaaatgaaggataaggtttctcgcattgatattgttcttcaccatatgaataatttatacggtagcgcacattcaaataatatctcaattattattgatccaattagtgaaatttatttcacaattaatggaaagaagattacagctgaaggtttaagaagagaaaaccttagttataagttttctaaggaagaaatggagcaagttccagatggctacgaacgattgcttcacgatgtgtttgtagcagatagaactaactttactcactggtcagaattgaagcaatattggaagttcgttgatgcagttgaagatgtttggcaagatgaaaataaagatgttaagcagcttgaacaatatccaagtggtaagttcggtacggaatcaagtaatcatatttttgaaaaagatagcgagcactggatttaccgttaa

SEQ ID NO: 298 - protein, 482 aa, Lactobacillus johnsonii
MKNIPVVMIIFGGSGDLAHRKLYPALFNLYQKGLIHDHFAVIGTARRPWSHEYLQEQVVEAVKESCDNFDEKEAKEFASHFYYQSHDVTDIGHYIALKELAAKLDEKYQAEGNRIFYMAMAPRFFGTIATHINDQKLLGSGFNRLVIEKPFGHDLASAEKLNREIGESFDEESVYRIDHYLGKEMVQNIMPLRMTNPIVKNIWNNDYIANMQVTLAESLGVGTRGGYYETSGALRDMVQNHIFQIITLLAMPEPKGLDSDHIHQAKQELLDSLVIPTPEMVKKHFSRGQYLADDNEVEYLKADQVALDSKVETFVAGEVKFKKGPVADVPIYFRTGKKMKDKVSRIDIVLHHMNNLYGSAHSNNISIIIDPISEIYFTINGKKITAEGLRRENLSYKFSKEEMEQVPDGYERLLHDVFVADRTNFTHWSELKQYWKFVDAVEDVWQDENKDVKQLEQYPSGKFGTESSNHIFEKDSEHWIYR

SEQ ID NO: 299 - DNA, 1485 bp, Bacillus cereus
  CDS (1)..(1485)
atggaatcaatgacctttgttttatttggagcgacaggggacttagcgaaacgaaaaatttaccccgcactatataacttatatagagatcaaaagcttccaaagcaaatatccgttatcgggcttggaagacgccaagtatctcatgtagattttcaaggaagaataaaagaatcaatagagacattttcccgtcatagagaagaaggtactctagaacttgaaggttttttagataattttcgctattgtccattagatgtgagtaagccggaagactatgagagattattgcaagtcgttcgtgaaagggaagaagaactacatataaaagggaatagaatgttctatctttccgttgctcctgaatttttcgagaccattgctttaaatattaaggaaagcggacttgataaaacggatggatggaaacgcctaatgattgagaaaccgtttgggcacgatcttcaatctgctcgtgagttgaatgataagcttagtcgcacgtttgaagaagatgagatataccgtattgatcattatttaggtaagccgatgattcaaaaccttgaagcactagagtttgcaaatcctgttctccaatcgatttggaataaagaacatatagcgaatgtacaaattacagcgagtgaaacagttggggttgaagaaagagcaggatattatgatcaggcaggagccattcgagatatggttcaaaatcatatgttacaaatattaatgatgactgctatgaatctgccggaaaaggttaatgcatgtgaaattcgagaggaaaagcgaaaggtaatggagacgcttcgtaaagtgaaaaaagaagacgttcaaaaccatatcattcgcggacaatacgcttcaggagagataaaaggcgagcaagttgtagcatataaagaggagccaggagtaaatccttcttctaatatagacacatttgttgctgctcgtttatggatcgataatccgttttggactgacgttcccttctatatacgaacaggcaaacgaatgaaagaaaaatctactcgtattgtaatcgaatttaaaaatacgctaaaacagcaatatcaagataataatccaaatgcagcacctaacttattaataattgaaattagcccaggtgagaatgtttcattacagttaaatagtaaaaatccattgaaaaatggagaaattgaaccgatgcgtattaactttacttgcgagcaagcagatgtgggagtgcctgaagcgtatgaaagacttattcatgatgctgtaagtggagacgctacattctttgcacattggagagaagttgaattgtcatgggaatgggtacaaccaattcttgaagcattcgaggaaaacttattaccacttcatgaatatgagtctggttcatatggtccagatgcgtctcatgaattattgcaagaaagtggatttaaatggtggttagatcaagaaacggaaaaataa

SEQ ID NO: 300 - protein, 494 aa, Bacillus cereus
MESMTFVLFGATGDLAKRKIYPALYNLYRDQKLPKQISVIGLGRRQVSHVDFQGRIKESIETFSRHREEGTLELEGFLDNFRYCPLDVSKPEDYERLLQVVREREEELHIKGNRMFYLSVAPEFFETIALNIKESGLDKTDGWKRLMIEKPFGHDLQSARELNDKLSRTFEEDEIYRIDHYLGKPMIQNLEALEFANPVLQSIWNKEHIANVQITASETVGVEERAGYYDQAGAIRDMVQNHMLQILMMTAMNLPEKVNACEIREEKRKVMETLRKVKKEDVQNHIIRGQYASGEIKGEQVVAYKEEPGVNPSSNIDTFVAARLWIDNPFWTDVPFYIRTGKRMKEKSTRIVIEFKNTLKQQYQDNNPNAAPNLLIIEISPGENVSLQLNSKNPLKNGEIEPMRINFTCEQADVGVPEAYERLIHDAVSGDATFFAHWREVELSWEWVQPILEAFEENLLPLHEYESGSYGPDASHELLQESGFKWWLDQETEK

SEQ ID NO: 301 - DNA, 1539 bp, Ashbya gossypii
  CDS (1)..(1539)
atgatgtgtggagaagtgacgaggacagacgcttttgaaaaggatgtgataattacagtgtttggagcctcaggggatcttgccaagaagaagacgttcccagcactgtatggattgtatcgcgaggggtacctggacgacagcacgaagattattgggtatgctcggtcggagctatctgatgcggagctgcgggagcgcgtcaagccgtacttgagcaaaccagacgacgcagcgagtgaggccaagcaagccgagttcctggagaggatgagctacgtagctgggccttacgacaaggaggaggggtacgtgcagttgcgggagcagattgaggcttacgagcgcgaacggggcgttgagaaacctcacaggttgttctacttggcgcttcctcccagtgcgtttgtcagtgttgctgagaaaatcaagcagttcctctatgcggagggcggcgttacaaggttaattgtggaaaagccctttggccatgacctggagtcgtctcggaagttgcaaaagcagctggagcctctgttccgtgaggaggagatattccggattgaccactacttaggaaaggagatggtcaagaacctgctacctctgcggtttggtaatgcgttcttcaatgcctcctggaataaggaaaatatccagatgatccagatctcgttgaaggaaccatttgggacggaaggccgtggaggttactttgactccactggtattataagggacgtcatgcagaaccacttgctccaagtactaactttgctaaccatggagaggccagtatcttttgatccggagagcatacgtgacgagaaagtcaaggtgctgaaggccatcgttcctcttgaccacgaagacattttgattggacagtacggccgatctgaagatggtacaaagcctgcttacttagatgacgagactgtcagcaaggactctaagtgcgtgacatttgccgcgttgacctttaatatccagaatgagcggtgggatggagttcctattgtcatgcgtgcagggaaggcattgaacgaaggtaaggttgagatccgtattctatacaagcgcgtggcgcggggtatttttaacgatattccaaacaatgagctagttgtccgtgtccagccagatgaggccatatacttgaaattcaacgctaaaacaccggggttggattcgaattcccaaattacggagcttgatttgacttactcgaagaggtatagggactactggattccggaggcttacgaatctctgttgcgggatgctttgctgggcgatcattcgaattttgtgagagacgatgagttggatatcagctggaagctgttcacccctctcttaaattaccttgagggcccagacagccctcggcctgaaatttataagtatggttctcgtgggcctgatggtctaaccaagtacttggagaagcatcagtatgtcttcgaaaagagcgggctttaccagtggcctgtctcgtccccaaaagaaaaagcaagtttggagccacggttatga

SEQ ID NO: 302 - protein, 512 aa, Ashbya gossypii
MMCGEVTRTDAFEKDVIITVFGASGDLAKKKTFPALYGLYREGYLDDSTKIIGYARSELSDAELRERVKPYLSKPDDAASEAKQAEFLERMSYVAGPYDKEEGYVQLREQIEAYERERGVEKPHRLFYLALPPSAFVSVAEKIKQFLYAEGGVTRLIVEKPFGHDLESSRKLQKQLEPLFREEEIFRIDHYLGKEMVKNLLPLRFGNAFFNASWNKENIQMIQISLKEPFGTEGRGGYFDSTGIIRDVMQNHLLQVLTLLTMERPVSFDPESIRDEKVKVLKAIVPLDHEDILIGQYGRSEDGTKPAYLDDETVSKDSKCVTFAALTFNIQNERWDGVPIVMRAGKALNEGKVEIRILYKRVARGIFNDIPNNELVVRVQPDEAIYLKFNAKTPGLDSNSQITELDLTYSKRYRDYWIPEAYESLLRDALLGDHSNFVRDDELDISWKLFTPLLNYLEGPDSPRPEIYKYGSRGPDGLTKYLEKHQYVFEKSGLYQWPVSSPKEKASLEPRL

SEQ ID NO: 303 - DNA, 2074 bp, Oryza sativa
  CDS (138)..(1904)
gcggctagactttcgtcgatatccccgataaaatccacccgtctcccctcctccccactcgccttcgcctccatcctcctcctcctcctgccggcttgcatccgctcttccttcctccaggaggaaggcatacaggcatggcgctctcctgcatgaggtgctccccggccgccggcgccgtacgacgaggattggcatcggcggctccgccggcggcgctctccttcgccagatgcggcctccgtagagcggccgcgctcgggtggcgcgtcgccgccgtcaccactacgggagtgcagggtgccaaggatgctggtctggagaaggctgccagaagtgcttcccaatcaaaggtggaaaatggctcaccttcagaaatcattttagatgattttgaagacttgagccctctatcagaaaatgatgactccactgttagtatcactgtagtcggagcatctggtgaccttgccaagaagaagatatttcctgcactttttgctctatactatgaagattgtcttccaaagcatttcactatcttcggatatgcacgcagcaagatgacagatgctgaattgagaaacatggtcagcaaaacactgacatgcagaatagataaaagggaaaactgtaatgagaagatggaagagtttttaaagagatgcttctatcattcaggccaatatgattcagaggagcatttcatggaccttgacaagaagctgaaacaacatgagggttccagagtttctaaccgtcttttctacttgtcaataccaccaaatatattccttgatgttgtaaaatgtgcaagcaaatcagcatcatctgggaatggttggacaagggtaattgttgagaaaccttttggtcgtgactcagattcatcttctgcattaacaaggggtctgaagcagtacctggtagaggaccaaatcttcaggattgaccactacttgggaaaggaactagtggagaacctgtctgtccttcgcttctcaaatcttgtttttgaacctctatggtcaaggcagtatataaggaatgtgcagctgatattctcagaggatttcggcactgaaggacgaggagggtactttgataggtatggtattatccgtgacataatgcagaatcatcttcttcagatactagccctatttgcaatggaaactcctgttagcttggaggcagaggacataagaaacgaaaaggttaaagttctgcgttccatgaagcccctgcaactggaagatgtggtgataggacagtacaaaagtcatacaaagggtggtaccacataccctggatacactgaagataagacggtgcccaaggatagtgtaaccccaacatttgctgcagctgcacttttcataaataatgctagatgggatggagttccttttcttatgaaagctgggaaggctttacatacaaagggggctgagattagagtacagttccgacatgttcctggtaatctttataagaggagttttgggactgatcttgatacagccactaatgaacttgtcatacgtgtgcaacctgatgaagctatctacttgaagattaacaacaaaattcctggtcttggtatgagactagatagaagtaatttgaatcttcactatgcagcaaggtactccaaggagataccagatgcttatgagaggctcttacttgatgccattgaaggagagcgaaggctttttatccgttctgatgagttggatgccgcatgggagctcttcactcccttactcaaggagctggaagagaagcggatagcccctgagctatacccttatggaagccgcggtcctgtaggggctcactaccttgcagcaaagtacaacgtcagatggggtgatttgaccacagaacagaaggcatgagacagatgatatctattttcgctccttttttttcttttgccattgcatttctgtaagattgcatgctcagttagtgggacagatggaaaataaggcaatcagttagcttaggttgcaaggcctgtaaccattagactataaatagctttgtggtatattcactattgggt

SEQ ID NO: 304 - protein, 588 aa, Oryza sativa
MALSCMRCSPAAGAVRRGLASAAPPAALSFARCGLRRAAALGWRVAAVTTTGVQGAKDAGLEKAARSASQSKVENGSPSEIILDDFEDLSPLSENDDSTVSITVVGASGDLAKKKIFPALFALYYEDCLPKHFTIFGYARSKMTDAELRNMVSKTLTCRIDKRENCNEKMEEFLKRCFYHSGQYDSEEHFMDLDKKLKQHEGSRVSNRLFYLSIPPNIFLDVVKCASKSASSGNGWTRVIVEKPFGRDSDSSSALTRGLKQYLVEDQIFRIDHYLGKELVENLSVLRFSNLVFEPLWSRQYIRNVQLIFSEDFGTEGRGGYFDRYGIIRDIMQNHLLQILALFAMETPVSLEAEDIRNEKVKVLRSMKPLQLEDVVIGQYKSHTKGGTTYPGYTEDKTVPKDSVTPTFAAAALFINNARWDGVPFLMKAGKALHTKGAEIRVQFRHVPGNLYKRSFGTDLDTATNELVIRVQPDEAIYLKINNKIPGLGMRLDRSNLNLHYAARYSKEIPDAYERLLLDAIEGERRLFIRSDELDAAWELFTPLLKELEEKRIAPELYPYGSRGPVGAHYLAAKYNVRWGDLTTEQKA

SEQ ID NO: 305 - DNA, 1900 bp, Gluconobacter oxydans
  CDS (301)..(1767)
ttttgctttctgcatccatgtccggtttccttcctgaggcgtaagtcttggctgtattttccggcgctgcacgaacacagcatccgccgcgcggcttatcgtgatgagggccagacggtcaacggaattatgtgcacgtttcatgaacgcgtgaagatgacgaagcttttctcccgaggtcgtgcagggcccgtcccttgacaggaagggccctgacagggaactagacggtgcctgaaaaggcctgaaccctaacccttttttcccggtctgcgggttcgagaggtcagagagtcttccatggaacatttccagcaggtcgagcctttcgactatgtcatcttcggtgccactggcgatctcacgatgcgcaagctgctgcccgcgctctacaaccgccttcggatgggccagattccggatgatgcgtgcatcatcggagccgcccgtacggagctggaccgggaggcctatgtcgcgcgggcccgagacgcccttgagcggtttcttccctcagacatcctgggcccggggctggtcgagcgtttcctcgcccgtctcgattacgtgacgctggacagcagccgcgagggcccgcagtgggacgccctgaagtccctgctggccaaggcacagcctgaccgggtgcgcgtctatatttcgcaaccgcaccgcagcttacggcagcatctgcgagacctgaaccgctacgagctgatcacccccacgtcgcgggttgttctcgaaaagccgatcggtacgaacatggccaccgccaccgccatcaatgacggggtcggccagtattttccggaaaagcagatctaccggatcgatcattatctcgggaaagagacggtccagaacgttctcgccctgcgttttgcaaacccgctcatgaacgctgcctggtccggcgagcatatcgagagcgtgcagatcacggcggtcgagaccgtgggcgtcgaaggtcgtgcggcctattacgacacgtctggcgcgcttcgcgacatgatccagaaccacctgctccaggtactgtgtctggttgcgatggaagcccccgattcccttgaggccgatgccgtccgcaacgccaaactggccgtcctgaacgccctgcgccccatcacggatgccacagccgccaccgagacggtgcgcgcgcagtacacggcaggcgtggtcgatggcgagaatgttccgggttatcttgaagagctcggcaagcccagcgcgacggaaacctatgccgcaatccgcgcctgggtggacacgccgcgctggaagaacgtgccgttctacatccgcacggccaagcggtccggcaagaaggtcagcgagatcgtcgtgacgttccgcccggctgcgaccaccatgttcggcgccaccccggccagcaacaggctggtcctgcgcatccagcccaacgaaggcgtggacctgcgtctgaacgtcaagaaccctgcgctggatgtcttcaacctgcggacggcggatcttgatacctccatccgcatggaaggcggcctgcccttcccggattcctatgagcggcttcttctggatgccgtgcggggtgatccggtactgttcatccgccgcgacgaggtcgaggccgcatggcgctgggtcgagcccatccttgaggcctggaaacatgacaaggcgcccatgcagacctacagtgcgggttcctatgggccggaacaggcaacacaactgctcgccagccatggcgacacctggcatgaagcgtcggagtaaccgcatttgagcgacgataaaagcgcaacgccccgcctgggtcgcactccgggccggggcacgcgccggcagccccgcagcttcaaacagctccttctgcggcggcttctggtcgtcatcccggcttttctgc

SEQ ID NO: 306 - protein, 488 aa, Gluconobacter oxydans
MEHFQQVEPFDYVIFGATGDLTMRKLLPALYNRLRMGQIPDDACIIGAARTELDREAYVARARDALERFLPSDILGPGLVERFLARLDYVTLDSSREGPQWDALKSLLAKAQPDRVRVYISQPHRSLRQHLRDLNRYELITPTSRVVLEKPIGTNMATATAINDGVGQYFPEKQIYRIDHYLGKETVQNVLALRFANPLMNAAWSGEHIESVQITAVETVGVEGRAAYYDTSGALRDMIQNHLLQVLCLVAMEAPDSLEADAVRNAKLAVLNALRPITDATAATETVRAQYTAGVVDGENVPGYLEELGKPSATETYAAIRAWVDTPRWKNVPFYIRTAKRSGKKVSEIVVTFRPAATTMFGATPASNRLVLRIQPNEGVDLRLNVKNPALDVFNLRTADLDTSIRMEGGLPFPDSYERLLLDAVRGDPVLFIRRDEVEAAWRWVEPILEAWKHDKAPMQTYSAGSYGPEQATQLLASHGDTWHEASE

SEQ ID NO: 307 - DNA, 1515 bp, Rhodopseudomonas palustris
  CDS (1)..(1515)
atgaccacgcaagccaacagcaatcaggtccccgaaggctgcgcgttcgtcatcttcggcgccaccggcgacctcacccatcggctggtgattccggcgctctacaacctcgccgaagccaacctgctgcctgaaaaattctgcgtcgtcggcgtcacccgcaaggagatgtccagcgacgatctgcgcgacagcctgatgcagggcctgcgcaaatacgcgacccgcccggtcgacgacaaggtcgctgatcagcttctgtactgcgtcaccgcggtcagcgccgatcccagcgagccggcctcgttcgagcggttgcgcgagcggctggagaagctcgaggccaatcgcaacaccggcggcaaccggctgttctatctcgccacgccgcctgatgcgttcgcgccgatcgccaccgagctcggccgcgccgggctgcttaaggagaccagcggcgcctggcgccggctggtggtggagaagccgttcggcaccgacctcgcctcggccaaggcgctgaacgatcatctgctcagcatcatctccgagcacgagctgtaccggatcgatcactacctcggcaaagagacggtgcagaacatcctggtgctgcggttctccaacggcatgttcgagccgatctggaacagagagcacatcgaccacatccagatcaccgtcgaggaaaagctcggcgtcggccatcgcggcagcttctacgacaagaccggcgcgctgcgcgacatggtgccgaaccatctgtttcaactgctgtcgctggtggcgatggagccgccggcgcatttcaacgcccacgcggtgcgttcggccaaggccgacgtgctcgcggcgatccagatccaaaccgaagaggaagcgctgcgcaattcggtgcgcggccaatacacttcgggcaagatcggcgacaccgacatcccggactatcgcagcgccaaggacgtcgcggccgacagcaccaccgagaccttcgcggcgctgacactgtcgatcgacaattggcgctgggccggcgtgccgttctatctgcgcaccggcaaggcgctgtcgggcaagcgcaccgaggtggcgatcaaattcaaggaggcgccattctcgatgtttcgctgcaccccggtgcaggaactgtcgcagaactttctggtcattgggatcgaaccggtcgaaggcatctcgctgcagttcaacaccaaggtgccgggaccgatgatcgccatcgacggcgtcgagatgaccttccgctacaaggactacttcaaggtggcgccgagcaacggctacgagacgctgctgcacgactgcatgatcggcgacaacatcctgttccaacgcgccgacggtgtcgaagccggctggcgcgcggtacaacccttcctcgacgcctggaagaaggccggcgcgcacggccttcagatctatcgcgccggcagcgatggcccggaagacgccgacgaactgctggggcgcgacggtcgcaattggcggaagccgacctga

SEQ ID NO: 308 - protein, 504 aa, Rhodopseudomonas palustris
MTTQANSNQVPEGCAFVIFGATGDLTHRLVIPALYNLAEANLLPEKFCVVGVTRKEMSSDDLRDSLMQGLRKYATRPVDDKVADQLLYCVTAVSADPSEPASFERLRERLEKLEANRNTGGNRLFYLATPPDAFAPIATELGRAGLLKETSGAWRRLVVEKPFGTDLASAKALNDHLLSIISEHELYRIDHYLGKETVQNILVLRFSNGMFEPIWNREHIDHIQITVEEKLGVGHRGSFYDKTGALRDMVPNHLFQLLSLVAMEPPAHFNAHAVRSAKADVLAAIQIQTEEEALRNSVRGQYTSGKIGDTDIPDYRSAKDVAADSTTETFAALTLSIDNWRWAGVPFYLRTGKALSGKRTEVAIKFKEAPFSMFRCTPVQELSQNFLVIGIEPVEGISLQFNTKVPGPMIAIDGVEMTFRYKDYFKVAPSNGYETLLHDCMIGDNILFQRADGVEAGWRAVQPFLDAWKKAGAHGLQIYRAGSDGPEDADELLGRDGRNWRKPT

SEQ ID NO: 309 - DNA, 1650 bp, Corynebacterium diphtheriae
  CDS (1)..(1650)
atgcccaacgtgagtaaaccagtggctaacggaaacaccgtagaaagtaacaatgctgaacttgctttcggcggtgttgatttttcctattctgatacacatgagaattcgtgtagtagaacgtcaagcaaatgggtcaatcccctaagggatgctgaggacaagcgcctcccccgcatcgcgggcccgtgcggaatggttatttttggtgtaactggtgatctcgctcggaaaaagctcctgccagcgatctatgatcttgcacacaggggcctattgcctgcaggtttcagtcttgtcggctacggtcgacgaggctggtctaaggccgactttgaaaattacgtcaagcaagcagttgttgccggtgcccgtaccgatttccgcgaaaatgtttgggcacgacttgccgaaggtatgcacttcgttcaaggcaatttcgatgatgatgcagcatttgatagtttggcatcgcttttggcggatcttgatcagacccgtggaactgccggtaactgggccttttatctctctgttccaccagattatttttcggatgtttgccatcaacttcagcgctcaggcatggctacagccgagggcaattcatggcgtcgcgtcattgtggaaaagccttttgggcatgatcaagaatcagcacgtcagctaaacaacttgatcaattcagtattccctgaaaagtcagtatttcgtatcgaccactacttgggtaaagagacagtgcaaaatattatggcactgcgctttgcaaaccagctatttgatccgctctggaattctcactatgttgaccatgtccaaatcaccatggctgaggatatcggtctaggcggtcgcgctggttactatgatggaatcggcgccgctagagacgttatccaaaaccaccttattcagctgttggcgctggtagctatggaggaacccgtagcttttaccccacaagagcttcaggctgaaaaaatcaaggttcttcgtgccactcgcccagtagaaccttttgctaaaacaacagcccgagggcaatattcgcgcggttggcagggatctgagctcgtccaaggtctacgagaagaagacggatttgatcctaattccggaactgaaacttatgctgcctgcacactcgagataaattcgcgtcgttgggccggtgtgcccttttatcttcggactggaaagcgtttaggacgccgggtgactgagatcgcccttgtattcaaggatgcgcctcatcagccatttagcgaaggtagccgtcattcccaaggccgcaacgtcgtagtgatccgagtccagcctgatgagggtatgctgatgcgttttggttccaaggttcctggtaacacgatggaagtacgcgacgtcaacatggacttctcgtactcagaggcatttaccgaagaatcaccggaagcctacgaacgactcattctcgatgcacttctcgacgaagcaagtctcttcccaacaaatgaagaagttgagcttagctggcagatcctagatccgatattgaacttctggtctgatcgtgggcaaccggaagaataccccgctggcacctggggcccagctggtgcagacaagatgctggagcgcgaaggtcgcgcttggcgtcgaccttaa

SEQ ID NO: 310 - protein, 549 aa, Corynebacterium diphtheriae
MPNVSKPVANGNTVESNNAELAFGGVDFSYSDTHENSCSRTSSKWVNPLRDAEDKRLPRIAGPCGMVIFGVTGDLARKKLLPAIYDLAHRGLLPAGFSLVGYGRRGWSKADFENYVKQAVVAGARTDFRENVWARLAEGMHFVQGNFDDDAAFDSLASLLADLDQTRGTAGNWAFYLSVPPDYFSDVCHQLQRSGMATAEGNSWRRVIVEKPFGHDQESARQLNNLINSVFPEKSVFRIDHYLGKETVQNIMALRFANQLFDPLWNSHYVDHVQITMAEDIGLGGRAGYYDGIGAARDVIQNHLIQLLALVAMEEPVAFTPQELQAEKIKVLRATRPVEPFAKTTARGQYSRGWQGSELVQGLREEDGFDPNSGTETYAACTLEINSRRWAGVPFYLRTGKRLGRRVTEIALVFKDAPHQPFSEGSRHSQGRNVVVIRVQPDEGMLMRFGSKVPGNTMEVRDVNMDFSYSEAFTEESPEAYERLILDALLDEASLFPTNEEVELSWQILDPILNFWSDRGQPEEYPAGTWGPAGADKMLEREGRAWRRP

SEQ ID NO: 311 - DNA, 1602 bp, Nonomuraea sp
  CDS (1)..(1602)
atgacagacccggcagcacccgcggaggaggccgtcaccgtggcggcggccgtcgcgggcaccgccaccaccgaggctgtggcagccgccaacccgctgcgcgacccgcgtgacaagcggttgccccgggtggcgggaccgtgcgtgatggtgttgttcggcgtgacgggtgacctggccaagcgcaagctgctaccggcgatttacgacctgggcaaccgggggctgctgccgcccggcttctcgctggtcggcttcgcccggcgcgattggaaagaccaggatttcgcccagttgacgcacgacgccgtcaaggcgcatgcccggacacccttccgtgaggaggtctggaagcagatccgcgagggcatccatttcgttcccggcgagttctcggacgacggggcgttcgacgcgctggccatggcgttggcagagatcgacgagacccgcggcacgggcggaaactacgctttctacctgtcggtgccgccgaagttcttccccgtggtggtggagcagctcaagcgcaccgggctgtccgacgcgcccgacggctcgtggcggcgggtggtgatcgagaagccgttcgggcacgacctgcagtcggcccacgagctgaacgagatcaccacctcggccttcccggagagctcgatcttccggatcgaccactacctgggcaaggagaccgtccagaacatcatggcgctgaggttcgccaacaacctctacgagccgatctggaaccgcagcttcgtcgaccacgtacagatcacgatggccgaggacatcggcatcggcggccgggccggctactacgacggcatcggcgccgcccgcgacgtgatccagaaccacctgctccagctcctcgcgctcgtcgcgatggaggacccgacctccttcgaggccaactcgctgcggcgggagaaggagaaggtgctcaaggccgtgcggctgcccgcgaacctgggcctgaacaccgcgcgcggccagtactccgcgggctggcagggcggcgagaaggtcgtcggctacctccaggaggagggcatctcgcaggagtccaccaccgagacctacgccgccatcaagctggagatcgccaaccggcgctgggccggcgtgccgttctacctgcgcaccggcaagcgcctgggccgccgcgtcaccgaggtggccgtggtgttccagcgggcgccgcacctgccgttcagcaaggacgacaccgagatcctcggccagaacgcgctggtcgtccgggtccagccggacgagggcatcaccgtgcggttcggctcgaaggtgccggggacggcgatggaggtgcgtgacgtctccatggacttcgcctacggcgagtcgttcctggagtcgtcgccggaggcgtacgagcggctgctgctcgacgtgatgatcggcgatccgccgctcttcccgcaccagcgggaggtggagctgtcgtggaacatcctcgacccgatcgaggagttctgggccacgcaggggcagccggagccgtacgagtccggttcgtgggggcccgagtcggccgacgcgatgatggcccgcgacggccgcgtgtggaggaggctctag

SEQ ID NO: 312 - protein, 533 aa, Nonomuraea sp
MTDPAAPAEEAVTVAAAVAGTATTEAVAAANPLRDPRDKRLPRVAGPCVMVLFGVTGDLAKRKLLPAIYDLGNRGLLPPGFSLVGFARRDWKDQDFAQLTHDAVKAHARTPFREEVWKQIREGIHFVPGEFSDDGAFDALAMALAEIDETRGTGGNYAFYLSVPPKFFPVVVEQLKRTGLSDAPDGSWRRVVIEKPFGHDLQSAHELNEITTSAFPESSIFRIDHYLGKETVQNIMALRFANNLYEPIWNRSFVDHVQITMAEDIGIGGRAGYYDGIGAARDVIQNHLLQLLALVAMEDPTSFEANSLRREKEKVLKAVRLPANLGLNTARGQYSAGWQGGEKVVGYLQEEGISQESTTETYAAIKLEIANRRWAGVPFYLRTGKRLGRRVTEVAVVFQRAPHLPFSKDDTEILGQNALVVRVQPDEGITVRFGSKVPGTAMEVRDVSMDFAYGESFLESSPEAYERLLLDVMIGDPPLFPHQREVELSWNILDPIEEFWATQGQPEPYESGSWGPESADAMMARDGRVWRRL

SEQ ID NO: 313 - DNA, 1551 bp, Parachlamydia sp
  CDS (1)..(1551)
atgcataactcgcattattttgttaatcctttgaacgaaccgaatcggcccataaaaattccagaatcttgtattttagtcatttttggagcgaccggtgatttaacagctcgtaaactaattccagctttgtataacttagcgagagacggccaacttcctggtcattttgcctgtgtaggctttgctagaagggcaaaaacacatgatgagtttcgggaagaaatgttagaagcagttaacaaattttcaagatcgaaaccagttgaacaaggactctggaaacgctttcgtgaacaattgttttatcatcaatcagaatttgatgatgatgaagggtataaaagcttaaaccaatttttagaaaaactcgacacacaaatgggaactaaaggtaaccgagttttttatttatctatccagcctagctattttcctctcgttgttgaaaagcttagccaacaccaattgacatatccagttaaacaagtcaaagacaaatggagtcgtgtcattatagaaaagccttttggaagagatattgaatcagcaaaacaacttcaacaagatcttgtgcaacacctagatgaaagtcaaatttatcgaattgatcattatttgggaaaagaaactgtacaaaatttattagtttttagatttggtaatcccatctttgaatcagtttggaataaccatcatattgataatattcaaattactgttggtgaagaaattggaattggttctcgcggtcgattttgggaagaagcaggaatgttgcgagatattgtccaaaatcatgtgatgcaactcctttctcttgttgcgatggaacccccgacgagtctccaagccaactcagtccgcggcgaaaaagttaaagtcattgaagctattagacctatccccttcgattcaatggaacaatgcgttatccggggccaatatggatctggattcattaacggggaacccgttaaaggatatcgagacgaggaaaatgtagactctaaatcttttgttgaaacctacgttgccttgcaactttctatcgataactggcgttgggctggagttcccttctatttacgtgctggtaaacgcctacccaaacgagctactgaaattgcgattactttcaaaaaagcccccggatatctatttgaaggaacttcagctttgattgactcaaacgttttagtgattcgtattcaaccggatgaaggaatttcattgagaattaattgcaaagtccctgcattaaacacagtcattcaaccggtgaaaatggattttcgttacggatcttactttggtgccattcctcccgaagcttatgaaagattaatttgtgattgcatggccggggataatactttatttgctagagatgacgaagtcattatgtcttggaagttgctcacacctattttagaacattggcaagaaacatccccgacagattttccaaattatgccgcgggaacttgggggccagaccgagccgaagaaatgctaaaacgccaaggacgtcattggagacttatttaa

SEQ ID NO: 314 - protein, 516 aa, Parachlamydia sp
MHNSHYFVNPLNEPNRPIKIPESCILVIFGATGDLTARKLIPALYNLARDGQLPGHFACVGFARRAKTHDEFREEMLEAVNKFSRSKPVEQGLWKRFREQLFYHQSEFDDDEGYKSLNQFLEKLDTQMGTKGNRVFYLSIQPSYFPLVVEKLSQHQLTYPVKQVKDKWSRVIIEKPFGRDIESAKQLQQDLVQHLDESQIYRIDHYLGKETVQNLLVFRFGNPIFESVWNNHHIDNIQITVGEEIGIGSRGRFWEEAGMLRDIVQNHVMQLLSLVAMEPPTSLQANSVRGEKVKVIEAIRPIPFDSMEQCVIRGQYGSGFINGEPVKGYRDEENVDSKSFVETYVALQLSIDNWRWAGVPFYLRAGKRLPKRATEIAITFKKAPGYLFEGTSALIDSNVLVIRIQPDEGISLRINCKVPALNTVIQPVKMDFRYGSYFGAIPPEAYERLICDCMAGDNTLFARDDEVIMSWKLLTPILEHWQETSPTDFPNYAAGTWGPDRAEEMLKRQGRHWRLI

SEQ ID NO: 315 - DNA, 1500 bp, Photobacterium profundum
  CDS (1)..(1500)
atggttcagccagaaaataacgcgattgttatttttggtgcgtcaggcgatttgactcaccgaaaattgattccagcattttatcatctctatgctaatgggttattaccagaagattttgcaattttaggcgtaagtcgtactgaatatagtgaccaagattttcgtgaaaaactaaaaatttcactcacagaaacagaaaaggtaaacgaagaaacgctaattaaattttgtgagcatttatattaccaagcattgaatacgtcagaagtggctgaatatgcgctgttaaaacagcgtttgggtgatttgaatgataagcatcatacccaaggtaatactatttattacttggcaaccccaccaagcttgtatggtgttattcctgaatgtttgggtgcgcatggcttaaacgacgaaacgcacggttggaaaaaccttattgttgaaaagccatttggttacgatttagcatcagccaacgagcttgatgaacgtattcatgcgcatttcaaagagcaacaaatttaccgcattgaccactacttaggcaaagaaacagtacagaatctacttgtatttcgttttgctaatgggatgtttgaaccattatggaaccgtaatttcatcgaatacgttgagatcacggcagctgaatctttaggtgtcgaagagcgcggtggctattacgatggagccggtgctgtacgtgatatgttccaaaatcacttacttcaagtacttgctatggttggaatggaatcgccagcagcaatcaatgcagattctattcgtgatgaagttgtgaaggttatgcaaagctttcagcctttgtcagacaaagatttagaaaaaaatcttgtgctagggcaatacaccgattccacagtaagaggcgatcatctaccaggataccgagaagaacatggcgtagcagatgattctcgcacagaaacgtatgttggtatgaagatgtttatccagaactggcgttggaatggcgtgccattttacgttcgtactggtaagcgtttacccactcgcgtgacggaagtggtcattcactttaagaaaacaccacacccagtgttcggtaccaatgcaccagagaataagctgatcattcgtattcaacccgatgaaggtattctaatgagtttcggtttgaaaaagccaggggctggctttgaagctgaagaagtttctatggatttccattacggcgatttagaagaaacgaatatgcttaccgcttacgagcgattattgcttgactgtatgaagggtgatgccacgttgtttgcccgaactgatgcggtaaaagcgtgctggaaattcgtacaacccattcttgaatataaagaaaatcctgaccatttatttggttatgcggcaggtacttggggaccaaaagaagcggatgagttattacaaggcgacgaacgtaattggcgctttccgtgtaaaaacctgactaatactgactattgtgagttatag

SEQ ID NO: 316 - protein, 499 aa, Photobacterium profundum
MVQPENNAIVIFGASGDLTHRKLIPAFYHLYANGLLPEDFAILGVSRTEYSDQDFREKLKISLTETEKVNEETLIKFCEHLYYQALNTSEVAEYALLKQRLGDLNDKHHTQGNTIYYLATPPSLYGVIPECLGAHGLNDETHGWKNLIVEKPFGYDLASANELDERIHAHFKEQQIYRIDHYLGKETVQNLLVFRFANGMFEPLWNRNFIEYVEITAAESLGVEERGGYYDGAGAVRDMFQNHLLQVLAMVGMESPAAINADSIRDEVVKVMQSFQPLSDKDLEKNLVLGQYTDSTVRGDHLPGYREEHGVADDSRTETYVGMKMFIQNWRWNGVPFYVRTGKRLPTRVTEVVIHFKKTPHPVFGTNAPENKLIIRIQPDEGILMSFGLKKPGAGFEAEEVSMDFHYGDLEETNMLTAYERLLLDCMKGDATLFARTDAVKACWKFVQPILEYKENPDHLFGYAAGTWGPKEADELLQGDERNWRFPCKNLTNTDYCEL

SEQ ID NO: 317 - DNA, 26 bp, Artificial sequence
  Primer
atgaaggataaagtgtataagcgtcc

SEQ ID NO: 318 - DNA, 27 bp, Artificial sequence
  Primer
ttaggcagcgttaattacaaactgttc

SEQ ID NO: 319 - protein, 534 aa, Artificial sequence
  Consensus sequence
  Variant (2)..(3): Xaa in position 2 to 3 is any amino acid
  Variant (7)..(9): Xaa in position 7 to 9 is any amino acid
  Variant (11)..(12): Xaa in position 11 to 12 is any amino acid
  Variant (14)..(17): Xaa in position 14 to 17 is any amino acid
  Variant (19)..(23): Xaa in position 19 to 23 is any amino acid
  Variant (25)..(32): Xaa in position 25 to 32 is any amino acid
  Variant (34)..(35): Xaa in position 34 to 35 is any amino acid
  Variant (37)..(81): Xaa in position 37 to 81 is any amino acid
  Variant (83)..(95): Xaa in position 83 to 95 is any amino acid
  Variant (97)..(118): Xaa in position 97 to 118 is any amino acid
  Variant (120)..(123): Xaa in position 120 to 123 is any amino acid
  Variant (125)..(151): Xaa in position 125 to 151 is any amino acid
  Variant (153)..(155): Xaa in position 153 to 155 is any amino acid
  Variant (159)..(159): Xaa in position 159 is any amino acid
  Variant (161)..(161): Xaa in position 161 is any amino acid
  Variant (163)..(164): Xaa in position 163 to 164 is any amino acid
  Variant (166)..(168): Xaa in position 166 to 168 is any amino acid
  Variant (170)..(178): Xaa in position 170 to 178 is any amino acid
  Variant (180)..(183): Xaa in position 180 to 183 is any amino acid
  Variant (193)..(193): Xaa in position 193 is any amino acid
  Variant (195)..(195): Xaa in position 195 is any amino acid
  Variant (197)..(200): Xaa in position 197 to 200 is any amino acid
  Variant (203)..(203): Xaa in position 203 is any amino acid
  Variant (205)..(211): Xaa in position 205 to 211 is any amino acid
  Variant (213)..(225): Xaa in position 213 to 225 is any amino acid
  Variant (227)..(228): Xaa in position 227 to 228 is any amino acid
  Variant (230)..(232): Xaa in position 230 to 232 is any amino acid
  Variant (234)..(235): Xaa in position 234 to 235 is any amino acid
  Variant (237)..(240): Xaa in position 237 to 240 is any amino acid
  Variant (242)..(244): Xaa in position 242 to 244 is any amino acid
  Variant (247)..(248): Xaa in position 247 to 248 is any amino acid
  Variant (252)..(253): Xaa in position 252 to 253 is any amino acid
  Variant (255)..(259): Xaa in position 255 to 259 is any amino acid
  Variant (263)..(263): Xaa in position 263 is any amino acid
  Variant (265)..(273): Xaa in position 265 to 273 is any amino acid
  Variant (275)..(275): Xaa in position 275 is any amino acid
  Variant (278)..(278): Xaa in position 278 is any amino acid
  Variant (282)..(298): Xaa in position 282 to 298 is any amino acid
  Variant (302)..(315): Xaa in position 302 to 315 is any amino acid
  Variant (317)..(328): Xaa in position 317 to 328 is any amino acid
  Variant (330)..(332): Xaa in position 330 to 332 is any amino acid
  Variant (334)..(342): Xaa in position 334 to 342 is any amino acid
  Variant (344)..(344): Xaa in position 344 is any amino acid
  Variant (347)..(347): Xaa in position 347 is any amino acid
  Variant (352)..(355): Xaa in position 352 to 355 is any amino acid
  Variant (358)..(369): Xaa in position 358 to 369 is any amino acid
  Variant (371)..(400): Xaa in position 371 to 400 is any amino acid
  Variant (402)..(407): Xaa in position 402 to 407 is any amino acid
  Variant (410)..(410): Xaa in position 410 is any amino acid
  Variant (412)..(419): Xaa in position 412 to 419 is any amino acid
  Variant (421)..(421): Xaa in position 421 is any amino acid
  Variant (424)..(454): Xaa in position 424 to 454 is any amino acid
  Variant (458)..(458): Xaa in position 458 is any amino acid
  Variant (460)..(461): Xaa in position 460 to 461 is any amino acid
  Variant (463)..(465): Xaa in position 463 to 465 is any amino acid
  Variant (467)..(470): Xaa in position 467 to 470 is any amino acid
  Variant (472)..(475): Xaa in position 472 to 475 is any amino acid
  Variant (477)..(480): Xaa in position 477 to 480 is any amino acid
  Variant (482)..(503): Xaa in position 482 to 503 is any amino acid
  Variant (505)..(506): Xaa in position 505 to 506 is any amino acid
  Variant (508)..(509): Xaa in position 508 to 509 is any amino acid
  Variant (512)..(533): Xaa in position 512 to 533 is any amino acid
GXXGDLXXXKXXPXXXXLXXXXXLXXXXXXXXGXXRXXXXXXXXXXXXXXXXXXXXXXXXXXXXXXXXXXXXXXXXXXXXXYXXXXXXXXXXXXXLXXXXXXXXXXXXXXXXXXXXXXYXXXXPXXXXXXXXXXXXXXXXXXXXXXXXXXXRXXXEKPXGXDXXSXXXLXXXXXXXXXEXXXXRIDHYLGKEXVXNXXXXRFXNXXXXXXXWXXXXXXXXXXXXXEXXGXXXRXXYXXXXGXXXRDXXQNHXXQXXXXXAMEXPXXXXXXXXXRXEKXKVLXXXXXXXXXXXXXXXXXGQYXXXXXXXXXXXXXXYXXXXXXXXXXXXSXXXTXXXXXXXXXNXRWXGVPFXXXXGKXXXXXXXXXXXXFXXXXXXXXXXXXXXXXXXXXXXXXXXXXXXNXXXXXXQPXEXXXXXXXXKXPGXXXXXXXXXXXXXXXXXXXXXXXXXXXXXXXAYEXLXXDXXXGXXXXFXXXXEXXXXWXXXXXXXXXXXXXXXXXXXXXXYXXGXXGPXXXXXXXXXXXXXXXXXXXXXXW

SEQ ID NO: 320 - protein, 16 aa, Artificial Sequence
  Consensus sequence
  Variant (2)..(3): Xaa in position 2 to 3 is any amino acid
  Variant (4)..(4): Xaa in position 4 is Gly or Ala
  Variant (5)..(5): Xaa in position 5 is Asp or Glu
  Variant (7)..(8): Xaa in position 7 to 8 is any amino acid
  Variant (9)..(9): Xaa in position 9 is Arg, Lys, Asn or His
  Variant (10)..(12): Xaa in position 10 to 12 is any amino acid
  Variant (13)..(13): Xaa in position 13 is Pro or Arg
  Variant (14)..(14): Xaa in position 14 is any amino acid
  Variant (15)..(15): Xaa in position 15 is Leu, Ile, Val, Met or Phe
  Variant (16)..(16): Xaa in position 16 is Tyr, Phe, Trp or Leu
GXXXXLXXXXXXXXXX

SEQ ID NO: 321 - protein, 101 aa, Artificial Sequence
  Consensus sequence
  Variant (1)..(1): Xaa in position 1 is Arg or Lys
  Variant (2)..(2): Xaa in position 2 is Val, Leu, Ile or Ala
  Variant (3)..(3): Xaa in position 3 is Ile, Val, Met or Ala
  Variant (4)..(4): Xaa in position 4 is Ile, Val, Leu or Met
  Variant (8)..(8): Xaa in position 8 is any amino acid
  Variant (9)..(9): Xaa in position 9 is Gly or Ala
  Variant (10)..(13): Xaa in position 10 to 13 is any amino acid
  Variant (14)..(14): Xaa in position 14 is Ser or Thr
  Variant (15)..(15): Xaa in position 15 is Ala, Ser or Tyr
  Variant (16)..(17): Xaa in position 16 to 17 is any amino acid
  Variant (18)..(18): Xaa in position 18 is Leu, Ile, Val or Phe
  Variant (19)..(21): Xaa in position 19 to 21 is any amino acid
  Variant (22)..(22): Xaa in position 22 is Leu, Ile, Val or Phe
  Variant (23)..(24): Xaa in position 23 to 24 is any amino acid
  Variant (25)..(28): Xaa in position 25 to 28 is any or no amino acid
  Variant (29)..(29): Xaa in position 29 is Glu or Asp
  Variant (30)..(31): Xaa in position 30 to 31 is any amino acid
  Variant (32)..(32): Xaa in position 32 is Ile, Val, Leu or Thr
  Variant (33)..(33): Xaa in position 33 is Tyr, Phe or Leu
  Variant (34)..(34): Xaa in position 34 is Arg, Lys or Leu
  Variant (35)..(35): Xaa in position 35 is Ile, Val, Leu or Met
  Variant (38)..(38): Xaa in position 38 is Tyr, Phe, Met or Leu
  Variant (41)..(41): Xaa in position 41 is Lys or Arg
  Variant (42)..(42): Xaa in position 42 is Glu, Asp, Gln, Pro or Ala
  Variant (43)..(43): Xaa in position 43 is any amino acid
  Variant (44)..(44): Xaa in position 44 is Val, Leu, Ile or Met
  Variant (45)..(45): Xaa in position 45 is any amino acid
  Variant (46)..(46): Xaa in position 46 is Asn or Glu
  Variant (47)..(47): Xaa in position 47 is Leu, Ile, Val, Met or Phe
  Variant (48)..(50): Xaa in position 48 to 50 is any amino acid
  Variant (51)..(51): Xaa in position 51 is Arg, Lys or Glu
  Variant (52)..(52): Xaa in position 52 is Phe or Tyr
  Variant (53)..(53): Xaa in position 53 is any amino acid
  Variant (55)..(58): Xaa in position 55 to 58 is any amino acid
  Variant (59)..(61): Xaa in position 59 to 61 is any or no amino acid
  Variant (62)..(62): Xaa in position 62 is Trp, Met or Asn
  Variant (63)..(66): Xaa in position 63 to 66 is any amino acid
  Variant (67)..(67): Xaa in position 67 is Ile, Val or Ala
  Variant (68)..(69): Xaa in position 68 to 69 is any amino acid
  Variant (70)..(70): Xaa in position 70 is Val, Ile, Met or Leu
  Variant (71)..(71): Xaa in position 71 is any amino acid
  Variant (72)..(72): Xaa in position 72 is Ile, Val, Leu or Phe
  Variant (73)..(75): Xaa in position 73 to 75 is any amino acid
  Variant (77)..(78): Xaa in position 77 to 78 is any amino acid
  Variant (79)..(79): Xaa in position 79 is Gly, Ala, Lys or Val
  Variant (80)..(82): Xaa in position 80 to 82 is any amino acid
  Variant (83)..(83): Xaa in position 83 is Arg or Lys
  Variant (84)..(85): Xaa in position 84 to 85 is any amino acid
  Variant (86)..(86): Xaa in position 86 is Tyr or Phe
  Variant (87)..(87): Xaa in position 87 is Tyr, Phe or Trp
  Variant (88)..(88): Xaa in position 88 is Asp, Glu, Ala or Asn
  Variant (89)..(90): Xaa in position 89 to 90 is any amino acid
  Variant (92)..(93): Xaa in position 92 to 93 is any amino acid
  Variant (94)..(94): Xaa in position 94 is any or no amino acid
  Variant (95)..(95): Xaa in position 95 is Arg or Lys
  Variant (97)..(97): Xaa in position 97 is Met, Val, Ile or Leu
  Variant (98)..(98): Xaa in position 98 is Val, Ile, Leu, Met or Phe
  Variant (99)..(99): Xaa in position 99 is Gln, Pro or Thr
  Variant (100)..(100): Xaa in position 100 is Asn or Ser
  Variant (101)..(101): Xaa in position 101 is His or Gln
XXXXEKPXXXXXXXXXXXXXXXXXXXXXXXXXXXXDHXLGXXXXXXXXXXXXXNXXXXXXXXXXXXXXXXXXXXXEXXXXXXXXXXXXXXGXXXXDXXXXX

SEQ ID NO: 322 - protein, 26 aa, Artificial sequence
  Consensus sequence
  Variant (1)..(1): Xaa in position 1 is Arg, Lys or Phe
  Variant (2)..(2): Xaa in position 2 is Trp or Phe
  Variant (3)..(3): Xaa in position 3 is any amino acid
  Variant (4)..(4): Xaa in position 4 is Gly or Asp
  Variant (5)..(5): Xaa in position 5 is Val, Ile, Met or Thr
  Variant (7)..(7): Xaa in position 7 is Phe or Ile
  Variant (8)..(8): Xaa in position 8 is any amino acid
  Variant (9)..(9): Xaa in position 9 is Leu, Val, Met or Ile
  Variant (10)..(10): Xaa in position 10 is Arg, Lys, Gln or Cys
  Variant (11)..(11): Xaa in position 11 is any amino acid
  Variant (12)..(12): Xaa in position 12 is Gly or Ala
  Variant (14)..(14): Xaa in position 14 is any amino acid
  Variant (15)..(15): Xaa in position 15 is Leu, Met or Val
  Variant (16)..(21): Xaa in position 16 to 21 is any amino acid
  Variant (22)..(22): Xaa in position 22 is Ile, Val or Ala
  Variant (23)..(23): Xaa in position 23 is any amino acid
  Variant (24)..(24): Xaa in position 24 is Ile, Leu, Val or Met
  Variant (25)..(25): Xaa in position 25 is any amino acid
  Variant (26)..(26): Xaa in position 26 is Phe, Tyr or Leu
XXXXXPXXXXXXKXXXXXXXXXXXXX

SEQ ID NO: 323 - DNA, 2094 bp, Hordeum vulgare
  CDS (41)..(1909)
cgggatacggcggactgagaaagaagcgctaaccccgagcatggttacgacagtcctcgccgtggcggcttcagcagctccagcgccgcctccgtcgttggctgcgcgcttcagcccggttgcaggacctgctgtcggttttagagcgcattgttggattactgccaagatgaagctccacaaggccctggggaggcatggatggcaagtccagagaaagctggatattcgaggggatggtaaaattcctgactacttcgaggttgcatggcggactggaaatataactcgtcggaatgtacaacctgctggtgaaactggaggtgaaacggcaaatacaagctctgttatgtcagataactcgatcgatgacaaaggtttattgcatctgggactcaacaactctgaagctgatcgtcctgtactagaggaagaccttgttctgtttgataactttaatgaccaacctgaaagtgtaccatctctttgcattgctgtcattggagctactggcgaactggcaagaagtaaagtcttcccagcactatttgctctgtattacagtggttttcttcctcagaatgttgccatatttggatattctagaaagacattggcagacgaggatttaagatccatgattgaatccaatttgacctgtcgggtagatcaccacgaaaactgtgaagacaagttaaatgaattccttaaaaggacatactatgtcgatgcaggacacgataataaagatgggatggcgaaactaaatttgagaatgacacagatagagggcacttgtgcagcaaacaggatattctaccttgctgttccccaagaggcacttcttgatgtggcattgccattatctgacattgcccaaactaagcatggctggaataggataattatcgagaaaccatttggcttcactagtttgtcctcacaacgggtaacacagtctttgttgtcaagatttgaagagaagcaaatttaccgaattgatcatcttttggggaaggatctaattgaaaatctcactgtcttgagattttctaatttggtgtttgaaccattatggagtaggaagtacatacgtaatgtgcaggtcgttttttcagaagaaacatcaacagaaacacaagggaggtacttcggaaactatgggataatccgtgatatagtgcacagccacattcttcaaacgatagcactatttgctatggaaccacctgtaagtcttgatggggaggatatccgcgatgagaaggtgaaggtgctcagatcaattagaaaagtggacattgatgatgtcgtccttggtcaactcaaaaatacctgtggtaaagttgaccaatatacaaaatcaatgacacctacctacttggctgccgcaatgtacattgacaatgcacgttgggatggggtaccttttttgatcaagactggaatgggacttatggagaatagagctgagattcgtattcaatttcatcacgtccctggcaatatctaccgtgaacgttttggtcatgacatagatcttgacacaaatgagctggttttacgtgacctacccgaagaagccattctcttgaaagtcaacaataaggtcccgggtcttgggctccagttggatgcttcagagctcaacctactttacagagacaggtacgatgttgaagttccagattcatatgagcatcttcttttggatgttctagatggcgatagtcatctgttcatgcgaagtgatgaattagctgctgcatggagcgtgttggcgccaatactccatgagatcgaccagaagagggttgctcctgagctctacgaggctggggataaaggaccgattaatgcttactatctcgctgctaaacatggagtccgatgggatgatggctgctgagcggatgcttgggagctgctcaatgtatttcgcttccttctctctatgtagcaaaatctgtttggtaagaaatagagagaaaaaaagtgtttcttgcttgttgattcaaacccttccaaggtggatcaaagctactactccctccatcccaaaataaatgtctcaacattaaaaaaaaaaaaaaa

SEQ ID NO: 324 - protein, 622 aa, Hordeum vulgare
MVTTVLAVAASAAPAPPPSLAARFSPVAGPAVGFRAHCWITAKMKLHKALGRHGWQVQRKLDIRGDGKIPDYFEVAWRTGNITRRNVQPAGETGGETANTSSVMSDNSIDDKGLLHLGLNNSEADRPVLEEDLVLFDNFNDQPESVPSLCIAVIGATGELARSKVFPALFALYYSGFLPQNVAIFGYSRKTLADEDLRSMIESNLTCRVDHHENCEDKLNEFLKRTYYVDAGHDNKDGMAKLNLRMTQIEGTCAANRIFYLAVPQEALLDVALPLSDIAQTKHGWNRIIIEKPFGFTSLSSQRVTQSLLSRFEEKQIYRIDHLLGKDLIENLTVLRFSNLVFEPLWSRKYIRNVQVVFSEETSTETQGRYFGNYGIIRDIVHSHILQTIALFAMEPPVSLDGEDIRDEKVKVLRSIRKVDIDDVVLGQLKNTCGKVDQYTKSMTPTYLAAAMYIDNARWDGVPFLIKTGMGLMENRAEIRIQFHHVPGNIYRERFGHDIDLDTNELVLRDLPEEAILLKVNNKVPGLGLQLDASELNLLYRDRYDVEVPDSYEHLLLDVLDGDSHLFMRSDELAAAWSVLAPILHEIDQKRVAPELYEAGDKGPINAYYLAAKHGVRWDDGC

SEQ ID NO: 325 - DNA, 1897 bp, Glycine max
  CDS (133)..(1689)
gaaaacaccaactgttttgagttttccaaccttaaaaagactctctcttctctctctctctttctctccctgaagcaaaacaacattagcatcaaaaccagagtggttctagtaatccggtgctgctagaggatgggaactagtgaatggcatatcgagcgaagatctagcttcggcactgaatcccccttagcaagagaggcaggaaatgtgcctgaaactgggtcactctctattgttgtgcttggcgcttctggggatcttgctaagaagaagacatttcctgcacttttccatctataccggcagggattcttaccagcagatgaagttcacatttttggctatgcaaggacaaaaatatctgatgatgaattgagaaaccggttgcgtggctatcttgttccaaacaaaggtgcttctccccaactgttggaggatgtagagaagtttttacagctgatcaaatatgtaagtggctcttatgattctgaggatggatttcgcttgttggataaagagatttcagagcatgaatatttgaaaaagagtgttgagggtttatctcggaggcttttctatcttgctcttccaccttcagtatatccatctgtttgcaagatgatcaagacttgttgcatgaataaatctgatcttggtggatggacacgtgttgttgtcgagaagccttttggtaaggatctagaatctgcagaggaactcagtactgagattggaaagttgtttgaggaaccacagatttatcgtattgatcactacttgggaaaggaactagtgcagaacttgttggtacttcgctttgcaaatcggtttttcttgccactttggaaccgcgacaacattgacaatgtacagatagttttcagagaggattttggaactgatggccgtggtggatattttgaccaatatggaattattcgagatattattcaaaaccatttgctgcaggttctttgcttggttgctatggaaaaaccagtttctctcaggcctgagcacattcgggatgagaaagtgaaggttcttgaatcagtgctccctattagagatgatgaggttgttcttggacaatacgaaggctataaagatgacccaacagtacctgacaagtcaaacaccccaacatttgcaactgttattctgcgaatacacaatgaaagatgggaaggtgttccgttcatactaaaagcagggaaggcactaaattctagaaaggcagagatcagggttcaattcaaggatgtccctggtgatattttcaagtgtaaaaagcaggggagaaatgagtttgttatccgcctacaacctttagaagctatgtacatgaagcttacggtcaagcaacctggactggagatgtcaacagttcaaagtgagctagacttgtcatatggacaacggtatcaaggagtaaccattcctgaggcttatgaacgcctaattcttgacacaattaaaggtgatcagcagcattttgttcgcagagatgagttgaaggcatcctggcagatcttcaccccacttttgcacagaattgatgaaggggaattcaagccactcccctacaaaccaggaagcagaggtcctgcagaagcagatcagttacttgaaaaagcaggctatgttcaaacacacggctacatatggatccctcctaccttgtagagtaatctaatgtaataacatgaggaatctttagttgctaatgaatacacaataagcttgagaggcttcccttggaaccactcctcatgaatgtgtaatcaagcatttgaactatgagagtgtttgacacggtttgtgtaactgatttgcctttaaatgcaaaataaatggaaaatgaagtctatttaccggcaaaaaaaaaaaaaaa

SEQ ID NO: 326 - protein, 518 aa, Glycine max
MGTSEWHIERRSSFGTESPLAREAGNVPETGSLSIVVLGASGDLAKKKTFPALFHLYRQGFLPADEVHIFGYARTKISDDELRNRLRGYLVPNKGASPQLLEDVEKFLQLIKYVSGSYDSEDGFRLLDKEISEHEYLKKSVEGLSRRLFYLALPPSVYPSVCKMIKTCCMNKSDLGGWTRVVVEKPFGKDLESAEELSTEIGKLFEEPQIYRIDHYLGKELVQNLLVLRFANRFFLPLWNRDNIDNVQIVFREDFGTDGRGGYFDQYGIIRDIIQNHLLQVLCLVAMEKPVSLRPEHIRDEKVKVLESVLPIRDDEVVLGQYEGYKDDPTVPDKSNTPTFATVILRIHNERWEGVPFILKAGKALNSRKAEIRVQFKDVPGDIFKCKKQGRNEFVIRLQPLEAMYMKLTVKQPGLEMSTVQSELDLSYGQRYQGVTIPEAYERLILDTIKGDQQHFVRRDELKASWQIFTPLLHRIDEGEFKPLPYKPGSRGPAEADQLLEKAGYVQTHGYIWIPPTL

SEQ ID NO: 327 - DNA, 1518 bp, Saccharomyces cerevisiae; identical to SEQ ID NO: 57
  CDS (1)..(1518)

SEQ ID NO: 328 - protein, 505 aa, Saccharomyces cerevisiae; identical to SEQ ID NO: 58

SEQ ID NO: 329 - DNA, 1548 bp, Mus musculus
  Mus musculus (house mouse)
  CDS (1)..(1548)
atggcagagcaggtggccctgagccggacccaggtgtgtgggatcctgagggaagagttgtaccagggtgatgccttccaccaagctgatacacacatatttatcatcatgggtgcatcgggtgacctggccaagaagaagatctatcctaccatctggtggctgttccgggatggccttctacctgaagataccttcattgtgggctatgcccgctcacgactcacagtggacgacatccgaaagcagagtgagcccttctttaaagccactccagaagaaagacctaagctggaggagttctttgcccgtaattcctatgtagctggccagtatgatgatgcagcctcctataagcacctcaacagccacatgaatgccctgcaccaggggatgcaggccaaccgtctattctacctggccttgccccccacagtctatgaagcagtcaccaagaacattcaagagacctgcatgagtcagacaggctggaaccgcatcatcgtggagaagcccttcgggagagacctacagagctccaatcaactgtcgaaccacatctcctctcttttccgtgaggaccagatctaccgcattgaccactacctgggcaaagagatggtccagaatctcatggtgctgaggtttgccaacaggatctttggacccatctggaatcgagacaacattgcttgtgtgatcctcacatttaaagagccctttggtactgagggtcgtgggggctattttgatgaatttgggatcatcagggatgttatgcagaaccacctcctgcagatgttgtgtctggtggccatggaaaagcctgccactacaggttcagatgatgtccgtgatgagaaggtcaaagtgttgaagtgtatctcagaggtggaaactgacaacgtggtccttggccaatatgtggggaaccccaatggagaaggagaagctgccaatggatacttagatgaccccacagtaccccatgggtccaccactgccacttttgcagcagctgtcctctatgtggagaatgaacggtgggacggggtacccttcatcctgcgctgtggcaaagccctgaatgaacgcaaagctgaagtgagactgcagttccgagacgtggcaggtgacatcttccaccaacagtgcaagcgtaatgagctggtcatccgtgtgcagcccaatgaggcagtatacaccaagatgatgaccaagaagcctggcatgttctttaaccctgaggagtcggagctggatctaacttatggcaacagatacaagaatgtgaagctccctgatgcctatgaacgcctcatcctggatgtcttctgtgggagccagatgcactttgtccggagtgatgaactcagggaagcctggcgtatcttcacaccactgctgcacaagattgatcgagaaaagccccagcccatcccctatgtatatggcagccgcggccccacagaggcagatgagctgatgaagagagtgggcttccagtacgagggtacctacaagtgggtgaaccctcacaagctctga

SEQ ID NO: 330 - protein, 515 aa, Mus musculus
  Mus musculus (house mouse)
MAEQVALSRTQVCGILREELYQGDAFHQADTHIFIIMGASGDLAKKKIYPTIWWLFRDGLLPEDTFIVGYARSRLTVDDIRKQSEPFFKATPEERPKLEEFFARNSYVAGQYDDAASYKHLNSHMNALHQGMQANRLFYLALPPTVYEAVTKNIQETCMSQTGWNRIIVEKPFGRDLQSSNQLSNHISSLFREDQIYRIDHYLGKEMVQNLMVLRFANRIFGPIWNRDNIACVILTFKEPFGTEGRGGYFDEFGIIRDVMQNHLLQMLCLVAMEKPATTGSDDVRDEKVKVLKCISEVETDNVVLGQYVGNPNGEGEAANGYLDDPTVPHGSTTATFAAAVLYVENERWDGVPFILRCGKALNERKAEVRLQFRDVAGDIFHQQCKRNELVIRVQPNEAVYTKMMTKKPGMFFNPEESELDLTYGNRYKNVKLPDAYERLILDVFCGSQMHFVRSDELREAWRIFTPLLHKIDREKPQPIPYVYGSRGPTEADELMKRVGFQYEGTYKWVNPHKL

SEQ ID NO: 331 - DNA, 1593 bp, Fugu rubripes; identical to SEQ ID NO: 7
  Fugu rubripes (Japanese pufferfish)
  CDS (1)..(1593)

SEQ ID NO: 332 - protein, 530 aa, Fugu rubripes; identical to SEQ ID NO: 8
  Fugu rubripes (Japanese pufferfish)

SEQ ID NO: 333 - DNA, 1506 bp, Vibrio cholerae; identical to SEQ ID NO: 9
  CDS (1)..(1506)

SEQ ID NO: 334 - protein, 501 aa, Vibrio cholerae; identical to SEQ ID NO: 10

SEQ ID NO: 335 - DNA, 1470 bp, Pseudomonas aeruginosa
  CDS (1)..(1470)
atgcctgatgtccgcgttctgccttgcacgttagcgctgttcggtgcgctgggcgatctcgccttgcgcaagctgttcccggcgctctaccaactcgatcgtgagaacctgctgcaccgcgatacccgcgtcctggccctggcccgtgacgaaggcgctcccgccgaacacctggcgacgctggagcagcgcctgcgcctggcagtgccggcgaaggagtgggacgacgtggtctggcagcgtttccgcgaacgcctcgactacctgagcatggacttcctcgacccgcaggcctatgtcggcttgcgcgaggcggtggatgacgaactgccgctggtcgcctacttcgccacgccggcctcggtgttcggcggcatctgcgagaacctcgccgccgccggtctcgccgagcgcacccgggtggtgctggagaagcccatcggtcatgacctggagtcgtcccgcgaggtcaacgaggcagtcgcccggttcttcccggaaagccgcatctaccggatcgaccattacctgggcaaggagacggtgcagaacctgatcgccctgcgcttcgccaacagcctcttcgagacccagtggaaccagaaccacatctcccacgtggagatcaccgtggccgagaaggtcggcatcgaaggccgctggggctacttcgaccaggccgggcaactgcgcgacatggtgcagaaccacctgctgcaactgctctgcctgatcgccatggatccgcccagcgacctttcggcggacagcattcgcgacgagaaggtcaaggtcctccgcgccctcgagccgattcccgcagaacaactggcttcgcgcgtggtgcgtgggcagtacaccgccggtttcagcgacggcaaggcagtgccgggctacctggaggaggaacatgcgaatcgcgacagcgacgcggaaaccttcgtcgccctgcgcgtggacatccgcaactggcgctggtcgggcgtgccgttctacctgcgcaccggcaagcgcatgccgcagaagctgtcgcagatcgtcatccacttcaaggagccgccgcactacatcttcgctcccgagcagcgttcgctgatcagcaaccggctgatcatccgcctgcagccggacgaaggtatctccctgcaagtgatgaccaaggaccagggcctgggcaagggcatgcaattgcgtaccggcccgctgcaactgagtttttccgagacctaccacgcggcgcggattcccgatgcctacgagcgtctgctgctggaggtcacccagggcaaccagtacctgttcgtgcgcaaggacgaggtggagttcgcctggaagtggtgcgaccagctgatcgctggctgggaacgcctgagcgaagcgcccaagccgtatccggcggggagttgggggccggtggcctcggtggccctggtggcccgcgatgggaggagttggtatggcgatttctga

SEQ ID NO: 336 - protein, 489 aa, Pseudomonas aeruginosa; identical to SEQ ID NO: 12

SEQ ID NO: 337 - DNA, 1485 bp, Staphylococcus aureus
  CDS (1)..(1485)
atgagtactaaaaacaaacacatcccttgtttaatcacaatctttggtgcaactggtgacttaagccatcgtaagttgtttccatcaatattccatctctaccaacaagacaatttagatgaacatattgccatcatcggtattggacgtcgtgacattactaatgatgatttccgtaatcaagtaaaatcatcaattcaaaagcacgtaaaagatacaaacaaaattgacgcgtttatggaacatgtcttctatcatagacatgatgttagtaatgaagaaagctatcaagaattattagattttagtaatgaattagacagccaatttgaattaaaaggtaatcgactattctatttagcaatggcaccacaattctttggcgttatttctgattatctaaaatcttctggtcttactgatacaaaaggatttaaacgccttgttatcgaaaaaccattcggtagtgatttaaaatcagccgaagcattaaacaatcaaattcgtaaatcatttaaagaagaagaaatttatcgtattgaccactatttaggaaaagacatggttcaaaatatcgaggtattacgttttgcgaatgcgatgtttgaaccattatggaataacaaatatatttcaaacatccaagttacatcttctgaaatactaggtgttgaagatcgtggtggttattatgaatcaagtggtgcgctaaaagatatggtgcaaaaccacatgttacaaatggttgcattattagctatggaagcacctattagtttaaatagtgaagatatccgtgctgagaaagtaaaagtacttaaatcactgcgtcatttccaatctgaagatgttaaaaagaactttgttcgtggtcaatatggcgaaggctatatcgatggtaaacaagttaaagcataccgtgatgaagatcgcgttgcagatgactctaacacacctacatttgtttcaggtaaattaacaattgataactttagatgggctggcgtaccattctatatccgtactggtaaacgtatgaaatctaaaacaattcaagttgtcgttgaatttaaagaagtaccaatgaacttatactatgaaactgataaactgttagattcaaacctattagtaatcaatattcaaccaaatgaaggtgtatctttacatctaaatgctaagaaaaatacacaaggtatcgaaactgaacctgttcaattgtcttattcaatgagcgctcaagataaaatgaatactgtagatgcatatgaaaatctattattcgattgtcttaaaggtgatgccactaactttacgcactgggaagaattaaaatcaacatggaaatttgttgatgcaattcaagatgaatggaatatggttgatccagaattccctaactatgaatcaggtactaatggtccattagaaagtgatttattacttgctcgtgatggtaaccattggtgggacgatattcaataa

SEQ ID NO: 338 - protein, 494 aa, Staphylococcus aureus; identical to SEQ ID NO: 14

SEQ ID NO: 339 - DNA, 1488 bp, Streptococcus pneumoniae; identical to SEQ ID NO: 15
  CDS (1)..(1488)

SEQ ID NO: 340 - protein, 495 aa, Streptococcus pneumoniae; identical to SEQ ID NO: 16

SEQ ID NO: 341 - DNA, 1476 bp, Salmonella enterica; identical to SEQ ID NO: 17
  Salmonella enterica subsp. enterica serovar Typhi
  CDS (1)..(1476)

SEQ ID NO: 342 - protein, 491 aa, Salmonella enterica; identical to SEQ ID NO: 18
  Salmonella enterica subsp. enterica serovar Typhi

SEQ ID NO: 343 - DNA, 1476 bp, Agrobacterium tumefaciens
  CDS (1)..(1476)
atgagcagtcagatcattcctgttgaaccttttgattgtgtcgttttcggcggcacgggcgatcttgccgagcgcaagcttctgccggccctttatcaccggcaggtcgaaggccagttcacggagccgacccgcatcatcggcgcgtcgcgttcggtcatgacccatgaggaatatcgcaaattcgcgcaggacgccctgaaggaacacctgaaggccggcgaatatgacgatgcgcaggtgaccctgttcctcaaccggcttttctacgtgcccgtcgatgccaagtccggcaatggctgggacgtgctgaagaaactgctcgatgagggcaaggaacgcatccgcgcgttttatctggccgtcgcacccggcattttcggcgacatcgccgacaagatccgtgagcacaagctgatcacccgctcgacccgcatcgtcgttgaaaagccgatcggccgggatctcgcatccgcgcaggaactgaacgacaccatcggtcacgtcttcaaggaagagcagatcttccgcatcgaccactatctcggcaaggagacggtgcagaacctgatggcgctgcgtttcgccaatgcgctttacgagccgctgtggaattccgcccatatcgaccacgttcagatcaccgttgccgaagcggtgggtcttgaaggtcgcgccggttattacgacaaggccggtgcgctgcgcgacatggtgcagaaccacattctccagctgctttgcctcgttgccatggagccgcccgcttccatgaaatcggaggcagtgcgcgacgaaaagctcaaggtactgcgctcgctgaagccaatcgataccagcaatgtcgaaaagctgacggtacgcggccagtaccgcgccggcgcttccgcaggcggccccgtcaagggttatctggaagagctggaaggcggcgtttccaacaccgaaaccttcgtcgccatcaaggctgaaatcgccaactggcgctgggccggcgttcccttctacatccgcaccggcaaacgcctcgcgacccgtgtttcggaaatcgtcgtcaccttcaagcagatcccgcactcgatcttcgacgatgcggctggcaagatcgaagccaacaagctggtcattcgcctgcagccggatgaaggcgtcaagcagtcgctcctcatcaaggatcccggtccaggcggcatgcgcctgcgtcaggtctcgctggacatgagctttgccgaagccttcaacgtgcgcagccccgatgcctatgagcggctgttgatggacaccattcgttccaaccagacattgttcatgcgccgcgacgaggtcgaggccgcgtgggactggatcgaccccatcttgaagagctgggaagagctgggacagagcgtacagggttacactgccggcacctggggcccgagcggttcgatcgcactgatcgagcgcgacggccgcacctggcacgatgccgactga

SEQ ID NO: 344 - protein, 491 aa, Agrobacterium tumefaciens
MSSQIIPVEPFDCVVFGGTGDLAERKLLPALYHRQVEGQFTEPTRIIGASRSVMTHEEYRKFAQDALKEHLKAGEYDDAQVTLFLNRLFYVPVDAKSGNGWDVLKKLLDEGKERIRAFYLAVAPGIFGDIADKIREHKLITRSTRIVVEKPIGRDLASAQELNDTIGHVFKEEQIFRIDHYLGKETVQNLMALRFANALYEPLWNSAHIDHVQITVAEAVGLEGRAGYYDKAGALRDMVQNHILQLLCLVAMEPPASMKSEAVRDEKLKVLRSLKPIDTSNVEKLTVRGQYRAGASAGGPVKGYLEELEGGVSNTETFVAIKAEIANWRWAGVPFYIRTGKRLATRVSEIVVTFKQIPHSIFDDAAGKIEANKLVIRLQPDEGVKQSLLIKDPGPGGMRLRQVSLDMSFAEAFNVRSPDAYERLLMDTIRSNQTLFMRRDEVEAAWDWIDPILKSWEELGQSVQGYTAGTWGPSGSIALIERDGRTWHDAD

SEQ ID NO: 345 - DNA, 1530 bp, Nostoc sp.; identical to SEQ ID NO: 21
  Nostoc sp. PCC 7120
  CDS (1)..(1530)

SEQ ID NO: 346 - protein, 509 aa, Nostoc sp.; identical to SEQ ID NO: 22
  Nostoc sp. PCC 7120

SEQ ID NO: 347 - DNA, 1386 bp, Agrobacterium tumefaciens; identical to SEQ ID NO: 23
  CDS (1)..(1386)

SEQ ID NO: 348 - protein, 461 aa, Agrobacterium tumefaciens; identical to SEQ ID NO: 24

SEQ ID NO: 349 - DNA, 1476 bp, Brucella melitensis; identical to SEQ ID NO: 25
  CDS (1)..(1476)

SEQ ID NO: 350 - protein, 491 aa, Brucella melitensis; identical to SEQ ID NO: 26

SEQ ID NO: 351 - DNA, 1458 bp, Zymomonas mobilis; identical to SEQ ID NO: 27
  CDS (1)..(1458)

SEQ ID NO: 352 - protein, 485 aa, Zymomonas mobilis; identical to SEQ ID NO: 28

SEQ ID NO: 353 - DNA, 1470 bp, Bacillus subtilis; identical to SEQ ID NO: 29
  CDS (1)..(1470)

SEQ ID NO: 354 - protein, 489 aa, Bacillus subtilis; identical to SEQ ID NO: 30

SEQ ID NO: 355 - DNA, 1401 bp, Mycobacterium tuberculosis
  CDS (1)..(1401)
atggttgacggcggaggtggcgcgtcagatctgttggtgatcttcggaattaccggtgacctggcccgcaagatgaccttccgcgcgttgtatcggctcgagcgccaccagttgctggactgccccatcctgggtgtggccagtgacgacatgtccgtcgggcagttggtcaagtgggctcgcgagtccatcggtcgtaccgaaaagatcgacgatgcggtgttcgaccggttggcgggccggttgtcctacctgcacggtgacgtcaccgacagccagctctacgattcgctggccgaactgattggctcggcctgtcggccgctgtattacctggaaatgccgccggcgctgttcgcgccgattgtcgaaaatctcgcgaacgtgcggctgttggagcgcgcacgcgttgccgtggaaaagccgttcggccacgacctggcctccgcgctcgaactcaacgcccggctgcgagcggtgttgggcgaagaccaaatcctgcgtgtggaccactttctgggcaagcagcccgtcgtcgagctggagtacctgaggttcgccaatcaggcgttagccgagctctgggatcgcaacagcatctccgagatccacatcaccatggccgaggacttcggggtggaggaccgcggcaagttttacgacgccgtcggtgccctgcgtgacgtcgtgcaaaaccatctgctgcaggtgctggcgctggtgacgatggaaccgccggtcggttccagcgccgatgacctcaacgacaagaaggccgaggtcttccgggcgatggcgccgctggatcccgatcggtgcgtgcgtgggcagtacctcggctacaccgaagttgcgggcgtagcaagcgattcggcgaccgaaacgtatgtcgcgctgcgaaccgagatcgacaactggcgctgggccggggtgccgatcttcgtgcgggccggaaaagagctgcccgcgaaggtcaccgaagtacggctatttttacgccgagttccggcattggcctttctgcccaaccgccgaccggccgagcccaaccagattgtgctgcgtatcgaccccgatccgggtatgcgactgcagatttcggcccacaccgacgactcgtggcgagatatccacctggactcctcgttcgcggtggacctcggtgaaccgatacgaccctatgagcggctgctgtatgccggattggtcggcgatcaccagttgttcgcccgcgaggacagcatcgagcagacgtggcggatcgtgcagccgctgctcgacaacccgggtgaaatccatcggtacgatcgcggttcctggggtccggaagccgcgcagtcgttgctgcgcggtcaccgcggttggcagtcgccgtggctgccccgcggcacggacgcatga

SEQ ID NO: 356 - protein, 466 aa, Mycobacterium tuberculosis; identical to SEQ ID NO: 32

SEQ ID NO: 357 - DNA, 1545 bp, Mycobacterium tuberculosis
  CDS (1)..(1545)
atgaaaccggcccacgccgcggcgtcgtggcgcaacccgctacgagacaagcgggacaagcgattacccagaatcgccggcccgtgcggcatggtgattttcggcgtcaccggcgacctggcccgcaagaaggtgatgccggccgtctacgatttggccaaccgcggcctgctgccgcccacattctcgctggtggggtttgcccgccgagactggagcacccaggatttcggtcaagtggtgtacaacgccgtccaagagcactgccgaacaccgtttcggcaacagaactgggaccggctggccgagggattccgttttgtgccaggcactttcgacgacgacgacgcgttcgcccaactcgccgagacgctggagaagctcgacgccgagcgcggcaccggcggcaaccacgccttctacctggcgatcccgcccaaatccttcccggtggtgtgtgagcagctgcacaagtccggcctggcccgcccgcaaggcgaccggtggagccgagtcgtgatagagaagccgttcggccacgacctggccagcgcacgcgagctgaacaaggcggtcaacgcggtcttcccggaggaagcggtcttccgcatcgaccactacctgggcaaagagacggtgcagaacatcctggcgctgcggttcgccaaccagctgttcgacccgatctggaatgcgcactacgtcgaccacgtacagatcaccatggccgaagacatcggcctgggcgggcgcgcgggctattacgacggcatcggcgcggcccgcgatgtcatccagaaccatctcatgcagctgctggcgctgaccgcgatggaggagccggtcagcttccacccggcagcgttgcaggccgagaagatcaaggtgctctcggccacccgccttgccgagccactcgaccagaccaccagccgcggccagtacgccgccggctggcaaggcggggagaaggtggttgggctgctcgacgaggaggggttcgccgaggactccaccaccgaaaccttcgccgctatcaccctggaagtcgatacgcgccggtgggccggcgtgccgttctatctgcgaacgggaaaacgattgggccgccgggtgaccgagatcgctctggtcttcaggcgggcgccgcatctgccgttcgacgccaccatgaccgacgagctgggcaccaacgcgatggtcatccgcgtgcagcccgacgaaggtgtcacattgcggttcggctccaaggtgccgggcaccgccatggaagtccgcgacgtcaacatggacttctcctacggctcggcattcgccgaagattcaccggaggcctacgagcggctcatcctcgacgtcctgctcggcgagccctcgctgtttccggtcaacgcggaggtcgaactggcgtgggagatcctcgatccagcgttggaacattgggcggcacacgggacgcccgacgcctacgaggcaggtacctggggtccggaatcatccttggagatgctgcgccgcaccggccgggaatggcggcggccatag

SEQ ID NO: 358 - protein, 514 aa, Mycobacterium tuberculosis; identical to SEQ ID NO: 34

SEQ ID NO: 359 - DNA, 1320 bp, Chlamydia trachomatis; identical to SEQ ID NO: 35
  CDS (1)..(1320)

SEQ ID NO: 360 - protein, 439 aa, Chlamydia trachomatis; identical to SEQ ID NO: 36

SEQ ID NO: 361 - DNA, 1773 bp, Deinococcus radiodurans; identical to SEQ ID NO: 37
  CDS (1)..(1773)

SEQ ID NO: 362 - protein, 590 aa, Deinococcus radiodurans; identical to SEQ ID NO: 38

SEQ ID NO: 363 - DNA, 1467 bp, Pseudomonas aeruginosa; identical to SEQ ID NO: 39
  CDS (1)..(1467)

SEQ ID NO: 364 - protein, 488 aa, Pseudomonas aeruginosa; identical to SEQ ID NO: 40

SEQ ID NO: 365 - DNA, 1422 bp, Caulobacter crescentus; identical to SEQ ID NO: 41
  CDS (1)..(1422)

SEQ ID NO: 366 - protein, 473 aa, Caulobacter crescentus; identical to SEQ ID NO: 42

SEQ ID NO: 367 - DNA, 1437 bp, Borrelia burgdorferi; identical to SEQ ID NO: 45
  Borrelia burgdorferi (Lyme disease spirochete)
  CDS (1)..(1437)

SEQ ID NO: 368 - protein, 478 aa, Borrelia burgdorferi; identical to SEQ ID NO: 46
  Borrelia burgdorferi (Lyme disease spirochete)

SEQ ID NO: 369 - DNA, 1539 bp, Chlamydophila pneumoniae
  Chlamydophila pneumoniae, Chlamydia pneumoniae
  CDS (1)..(1539)
atgacgaatgttgttcaggaaactataggtggattgaattccccacgaacgtgccctccttgtattttagttatctttggagcgactggagatctgacggcaaggaaacttttacccgctctatatcacctcactaaagaaggacgcctttcagaccagtttgtttgcgtaggatttgcacgtcgagagaaatcgaatgaactgttccgccaagagatgaaacaagctgtcatacaattttctccttccgaattagatattaaggtatgggaagatttccaacagcgcctcttttatcatcgctcagaattcgataacaatatgggatatacatctctcaaggactccttagaagatttagataaaacgtacggaacacgtggaaatcgtcttttttatctttctactcccccccaatatttttctagaatcattgaaaatttaaataaacataagcttttctataaaaatcaagaccaagggaaaccctggtcccgtgtcattatagaaaaaccttttggaagagacttagatagtgctaagcaacttcagcaatgtatcaatgagaatcttaatgaaaattcggtctatcatatagatcactatttagggaaagaaacggttcaaaacatcttaacaacacgtttcgccaatacgattttcgaatcgtgttggaattcacaatatatcgatcatgtccaaatcagtttgagtgaaacgattggcataggatctcgcggcaatttctttgagaaatctgggatgcttcgggatatggtacagaaccatatgatgcagctactctgtttactcactatggagcctcctacaacttttgatgctgatgaaatcagaaaagaaaaaatcaaaattcttcaacgtatctcaccattttcagaaggttcttcgattgtccgaggacaatatggtccaggaacggttcaaggagtctcggtccttggctatcgtgaagaagagaatgttgacaaagattcccgagtagagacctacgtagctttaaaaacagtcattaataatccccgttggcttggagttcctttctatttacgtgcaggaaaacgactcgccaaaaaatctacagacatttctattatttttaaaaaatcaccctacaatttatttgcagccgaagaatgttcacgttgtccgatagaaaatgatttgctaatcatcagaattcaaccggacgaaggtgtcgctttgaaattcaactgtaaggttccaggaactaataatattgtccgtcctgttaagatggacttccgttacgacagctatttccaaactacaactccagaagcatacgagcgtttattatgtgattgcattataggggatcgtacgttatttactggtggagatgaagttatggcttcttggaagctttttactcctgtattagaggagtgggaccaagattcctcaccctcgtttccaaactatcctgcaggatcttcaggtcctaaagaagctgatgctctcattgaaagagacggaagaagctggagacctttatag

SEQ ID NO: 370 - protein, 512 aa, Chlamydophila pneumoniae
  Chlamydophila pneumoniae, Chlamydia pneumoniae
MTNVVQETIGGLNSPRTCPPCILVIFGATGDLTARKLLPALYHLTKEGRLSDQFVCVGFARREKSNELFRQEMKQAVIQFSPSELDIKVWEDFQQRLFYHRSEFDNNMGYTSLKDSLEDLDKTYGTRGNRLFYLSTPPQYFSRIIENLNKHKLFYKNQDQGKPWSRVIIEKPFGRDLDSAKQLQQCINENLNENSVYHIDHYLGKETVQNILTTRFANTIFESCWNSQYIDHVQISLSETIGIGSRGNFFEKSGMLRDMVQNHMMQLLCLLTMEPPTTFDADEIRKEKIKILQRISPFSEGSSIVRGQYGPGTVQGVSVLGYREEENVDKDSRVETYVALKTVINNPRWLGVPFYLRAGKRLAKKSTDISIIFKKSPYNLFAAEECSRCPIENDLLIIRIQPDEGVALKFNCKVPGTNNIVRPVKMDFRYDSYFQTTTPEAYERLLCDCIIGDRTLFTGGDEVMASWKLFTPVLEEWDQDSSPSFPNYPAGSSGPKEADALIERDGRSWRPL

SEQ ID NO: 371 - DNA, 1476 bp, Escherichia coli; identical to SEQ ID NO: 1
  CDS (1)..(1476)

SEQ ID NO: 372 - protein, 491 aa, Escherichia coli; identical to SEQ ID NO: 2

SEQ ID NO: 373 - DNA, 1548 bp, Treponema pallidum; identical to SEQ ID NO: 47
  Treponema pallidum subsp. pallidum (syphilis spirochete)
  CDS (1)..(1548)

SEQ ID NO: 374 - protein, 515 aa, Treponema pallidum; identical to SEQ ID NO: 48
  Treponema pallidum subsp. pallidum (syphilis spirochete)

SEQ ID NO: 375 - DNA, 1476 bp, Buchnera sp
  CDS (1)..(1476)
atgataatagaaacaaatcacgcttgcgatttagtaatttttggcgctaaaggagatctaacaaaaagaaaattattaccagctttatataaattagaaaaatctaaaaaaatacataaatatacacgcattatcgcttctggtcgtgctgattggagcacagaagactatatagaaaaaataaaaacagaagtaaaaaattttttaaatgaagaaataaatgatcttatttggaaaaatttgagttctcgtatatttttttgtaatattgatgtacatgaaccattgcatttttttagactaaaaacgatacttaaacaaaaaaaaaatatcatagtttactattgcgctgttccttctaatacgttgaattctatttttatcggtttaggaaatgcacatttaaattctgttccatcgcgtatagtattagaaaaaccattaggagtttgtttgaaaacatcaaaaaaaatcaatgatcaaatttctaaatattttctagaatcgcaaatttttcgtattgatcactatttaggaaaagaatcaatacttaatctttttgctttacgattttctaatacatgtcttttttataattggaataataaaacaattgatcatattcaaattactgtatctgaggaagttggaattgaagatagatggaattattttaatatgatgggacaaatgaaagatatggtgcaaaatcatcttttacaaatattaactattcttacgatggatcaaccaaaaaatattagttctgaaagtattcaacatgaaaaagtaaaaatactacgttctttaaaccccattaatattcataacataaataaaaaaactgttcgaggacaatattgttcaggagttatcaacgagaaaaaagtaccttcttatttagaagaaaatggtgcaaataaaaatagtttaactgaaacctttgttgctataaaagttgatctaaataataagcaatggtccggtgtcccattttaccttagaactggaaaacgtttagcacataaatattctgaaatagtcgttttttttaagaaaaaacctacaaatttgtttaaaaatttaaattcagaattattacaaaataaattaattatacgcttagaacctaatccaaatattatatttgatttttcagtaaaagcaccaggattagaacaagaatataaaatagaaaattcccagctaaaatccagtcaatttagtaagaaatattctaaaaattcaattgatgcttacgaaagattgttatttgaaattatgagaggtgtacaatctttattcgtatgccgagatgaaatagaagctgcgtggaaatggatagatcccatcatacatgcatggaaaaattctaaaaataatgcccctcaattatatatgtctggtacttgggggcctaaaaattctgatttgctacttgctcatgatggtcgtgtttggtatgaatttcattaa

SEQ ID NO: 376 - protein, 491 aa, Buchnera sp
MIIETNHACDLVIFGAKGDLTKRKLLPALYKLEKSKKIHKYTRIIASGRADWSTEDYIEKIKTEVKNFLNEEINDLIWKNLSSRIFFCNIDVHEPLHFFRLKTILKQKKNIIVYYCAVPSNTLNSIFIGLGNAHLNSVPSRIVLEKPLGVCLKTSKKINDQISKYFLESQIFRIDHYLGKESILNLFALRFSNTCLFYNWNNKTIDHIQITVSEEVGIEDRWNYFNMMGQMKDMVQNHLLQILTILTMDQPKNISSESIQHEKVKILRSLNPINIHNINKKTVRGQYCSGVINEKKVPSYLEENGANKNSLTETFVAIKVDLNNKQWSGVPFYLRTGKRLAHKYSEIVVFFKKKPTNLFKNLNSELLQNKLIIRLEPNPNIIFDFSVKAPGLEQEYKIENSQLKSSQFSKKYSKNSIDAYERLLFEIMRGVQSLFVCRDEIEAAWKWIDPIIHAWKNSKNNAPQLYMSGTWGPKNSDLLLAHDGRVWYEFH

SEQ ID NO: 377 - DNA, 1512 bp, Lactococcus lactis
  Lactococcus lactis subsp. lactis
  CDS (1)..(1512)
atgaccgaacaaaaacaagcacttttcaccatcttcggagcaactggtgacctcgctaaaagaaagctctacccttcactctttcgcctcttcaaaaaaggtgaactagctgacaattttgcagtcatcggtaccgctcgccgtccatggacaaacgagtattatcgtgaagttgttttagagtctatcaaagatttaatgaactcaaaaacggaagccgaaaatttcgccagccatttttattatcaaagtcacgatgttagcgacagctcacattacgttaacttaaaagatttgggtgaaaaattgcgtaaacagtataaaactgctggcaatcaagtcttctttttagcaatggctcctcaattttttggcactatctctgaacaccttaaatcagaaaatattttgacaggtgagggttttgagagaatcgtcattgaaaaaccatttggaacaagctacgatacggcaaaatcacttaatgacagcctcgcaaaagtatttagtgaagaacaaattttccgaatcgaccactaccttggaaaagaaatgatccaggccgtttctgccgttcgttttgccaatccaatctttgaatcgctttggaataatcaacacattgataacgttcagattacttttgccgaatttatcggtgttgaagaccgtggcggttactacgaaacttctggtgctttaaaagatatgattcaaaaccatgtcttacaagtactcagcctcattgccatggaaaaacctgaaaaatttgatgaatcttatattgtaaaagaaaaagttaaagcccttaatgcaatccgtcaatattcttctgaggaagctttagaaaacttcgttcgtggtcaatatatcgcaggacgttttgacggtgaagattacctaggctatcgcgaagaagattctgttgcaacagacagtcgaactgaaactttcgccgctggaaaatttgtcattgataatgagcgttggtcaggcgtccctttctatgttcgctcaggaaaacgtatgactgaaaaaggaactcgtattaatatcgttttcaaaaaagataaagacaatctctttgcagaaaattgcgatgaccaatccgttcaaaatgttttgaccatttatattcaaccaactgaagggttttcactttcagtaaatggaaaagcggctggtcaaggcttccatttagagcctttgcggttaaatttccgacacgatagtgaatttcttggaaattctcctgaagcatatgaaaaacttttcctagatgtccttaatggagacggaacaaatttctcacattgggaagaagcggctcgcgcctgggaacttattgatgttattcgagaagcttgggataaagaaacttctgagcttccaacttatgcggctcgcacaatgggacctaaggctgcatttgacttactagaaaaaaatggtcacgaatgggcttggcaacctgatttatggtatcaagaacgtggttactacaataaataa

SEQ ID NO: 378 - protein, 503 aa, Lactococcus lactis
  Lactococcus lactis subsp. lactis
MTEQKQALFTIFGATGDLAKRKLYPSLFRLFKKGELADNFAVIGTARRPWTNEYYREVVLESIKDLMNSKTEAENFASHFYYQSHDVSDSSHYVNLKDLGEKLRKQYKTAGNQVFFLAMAPQFFGTISEHLKSENILTGEGFERIVIEKPFGTSYDTAKSLNDSLAKVFSEEQIFRIDHYLGKEMIQAVSAVRFANPIFESLWNNQHIDNVQITFAEFIGVEDRGGYYETSGALKDMIQNHVLQVLSLIAMEKPEKFDESYIVKEKVKALNAIRQYSSEEALENFVRGQYIAGRFDGEDYLGYREEDSVATDSRTETFAAGKFVIDNERWSGVPFYVRSGKRMTEKGTRINIVFKKDKDNLFAENCDDQSVQNVLTIYIQPTEGFSLSVNGKAAGQGFHLEPLRLNFRHDSEFLGNSPEAYEKLFLDVLNGDGTNFSHWEEAARAWELIDVIREAWDKETSELPTYAARTMGPKAAFDLLEKNGHEWAWQPDLWYQERGYYNK

SEQ ID NO: 379 - DNA, 1572 bp, Drosophila melanogaster
  CDS (1)..(1572)
atggcaacgcaaaaggaagatcacaccgccctggatctcataatcaagtcactcaagtcgcctacaatggtctgcgagggaacccactttgacggcaagattccgcacacgttcgtcatctttggggcgtcgggcgatctggccaagaagaagatctaccccacgctctggtggctctaccgcgatgacctgctgcccaagccgaccaagttctgcggctatgcccgttccatgctgaccgtcgatagcatcaaggagcagtgtctgccgtacatgaaggtccagccgcacgagcagaagaagtacgaggagttctgggccctcaatgagtacgtgtccggcagatatgacggacgcactggcttcgagctgcttaaccagcagctggagattatggagaacaagaacaaggccaaccgcatcttctatctggccctgccgcccagcgtcttcgaggaggtgactgtcaacatcaagcagatctgcatgtcggtctgcggttggaaccgcgtgatcatcgagaagcctttcggccgggatgacgcctcctcggcaggcctgagcgaccatctggccggtctgttccaggaggatcagctgtaccgcatcgatcactacctgggcaaggagatggtgcagaagctgatgaccatacgcttcggcaacaagatcctcagctcgacgtggaaccgcgagaacatcgcctccgtgctgatcacgttcaaggagcccttcggcacgcagggtcgtggcggctacttcgacgagtttggcatcatacgcgacgttatgcagaaccatctgctgcagatcctctcgctggtggccatggagaagccggtgagctgccacccggacgacattcgtgacgagaaggtcaaggtgctgaagagcatcgaggccctgacgctggatgacatggtgctgggccagtacctgggcaatccgcagggtacaaacgatgatgcgcgcacgggctacgtggaggaccccaccgttagcaacgattcgaacacgcccacctacgccgctcggtcgctcaagatcaacaacgagcgctggcagggagtgcccttcatcctgcgctgcggcaaggcgctgaacgagcgaaaggcggaggtgcgcatccagtaccaggacgtgctcggcgacatcttcgagggcaatacgaagcgcaacgagctggtgatacgcgtccagccgggcgaggccctgtactttaagatgatgaccaagagccccggcataacgttcgacatcgaggagacggagctggacctcacctacgagcaccgctacaaggactcctacctgccggacgcgtacgagcgtctcatcctcgacgtcttctgcggctcccagatgcacttcgtccgctcggcagctgcgcaggcgtggcgcatcttcacgcccattctgcaccagatcgagaaggagcacattcgtccaatcacctaccagtacggatcgcgcggtcccaaggaggcggaccgcaagtgcgaggagaacaatttcaagtactccggctcctacaagtggcacggcggcaaggcggccacgtccaatcactga

SEQ ID NO: 380 - protein, 523 aa, Drosophila melanogaster
MATQKEDHTALDLIIKSLKSPTMVCEGTHFDGKIPHTFVIFGASGDLAKKKIYPTLWWLYRDDLLPKPTKFCGYARSMLTVDSIKEQCLPYMKVQPHEQKKYEEFWALNEYVSGRYDGRTGFELLNQQLEIMENKNKANRIFYLALPPSVFEEVTVNIKQICMSVCGWNRVIIEKPFGRDDASSAGLSDHLAGLFQEDQLYRIDHYLGKEMVQKLMTIRFGNKILSSTWNRENIASVLITFKEPFGTQGRGGYFDEFGIIRDVMQNHLLQILSLVAMEKPVSCHPDDIRDEKVKVLKSIEALTLDDMVLGQYLGNPQGTNDDARTGYVEDPTVSNDSNTPTYAARSLKINNERWQGVPFILRCGKALNERKAEVRIQYQDVLGDIFEGNTKRNELVIRVQPGEALYFKMMTKSPGITFDIEETELDLTYEHRYKDSYLPDAYERLILDVFCGSQMHFVRSAAAQAWRIFTPILHQIEKEHIRPITYQYGSRGPKEADRKCEENNFKYSGSYKWHGGKAATSNH

SEQ ID NO: 381 - DNA, 1575 bp, Synechococcus sp.
  CDS (1)..(1575)
atgactcccaaactgcttgagaacccgcttcgcattggactccgccaagacaaagtccctgaaccgcaaatcctcgtcatctttggggccaccggcgacttaacccagcgcaaactggtgcctgccatctacgagatgcacctcgaacggcgtttgccgccagaactgacgatcgtgggggtggctcggcgcgactggagcgatgactatttccgagagcaccttcgccaaggggttgaacagtttggcggcggcattcaagcagaggaagtttggaacacctttgcacaaggcctcttctttgcgccgggcaacattgatgacccccagttttatcaaacccttcgcgatcgccttgcgaatctggatgagctgcgcggcacgcggggcaatcgcactttttacctctcggtcgcaccccgtttctttggtgaagctgcaaaacaactcggggcagccggaatgcttgccgatccagctaaaacgcggctggtcgtcgaaaaaccttttggccgcgatctcagctccgctcaggtgctgaatgccatcttgcagaacgtttgccgcgaaagccagatctatcggattgaccattacctcggcaaagaaacagttcaaaacctcttagttttccggtttgccaatgccatttttgagccgctctggaaccggcaatacattgaccatgtccaaatcacggtggctgaaactgtggggttggaagggcgagctggctactacgaaactgctggtgctctgcgggatatggtgcaaaaccacttgatgcagctcttcagcctgacggcgatggagccgccaaactctctaggtgctgacggtatccgtaacgaaaaggtcaaggtggtgcaagccacacggctggcggatatcgacgatctcagtttgtctgcggtgcgggggcagtacaaagcgggctggatgaatggccgctctgtgcccgcctatcgggatgaggagggagcggatccccagtcgtttacgcccacctatgtcgccatgaaattgctggtcgacaactggcgctggcagggagtgccgttctatctacggacgggtaaacggatgcccaaaaaggtgacggagattgccattcagttcaaaaccgtgccgcacttgatgttccagtcagccacccaaaaagtgaatagtcccaacgtcttagtgctgcggattcagcccaatgaaggcgtgtccttgcgctttgaagtgaaaacaccgggttcctcgcaacggacgcgatcggtggatatggacttccgctacgacacggcttttggctcccccacccaagaggcctatagccgcctgctggtggactgcatgctcggcgatcagacgctgttcacccgcgctgatgaggttgaagcgtcttggcgggttgtgacgccgttactcgaatcttgggatgacccgcgccaagccgctggcatttctttttacgaagctggcacttgggagccggcagaggcggagcagttgatcaaccgtgatggtgccgttggcgtcgtctctaggatccctgcaacccagctcaattcttctggagatgtttga

SEQ ID NO: 382 - protein, 524 aa, Synechococcus sp.
MTPKLLENPLRIGLRQDKVPEPQILVIFGATGDLTQRKLVPAIYEMHLERRLPPELTIVGVARRDWSDDYFREHLRQGVEQFGGGIQAEEVWNTFAQGLFFAPGNIDDPQFYQTLRDRLANLDELRGTRGNRTFYLSVAPRFFGEAAKQLGAAGMLADPAKTRLVVEKPFGRDLSSAQVLNAILQNVCRESQIYRIDHYLGKETVQNLLVFRFANAIFEPLWNRQYIDHVQITVAETVGLEGRAGYYETAGALRDMVQNHLMQLFSLTAMEPPNSLGADGIRNEKVKVVQATRLADIDDLSLSAVRGQYKAGWMNGRSVPAYRDEEGADPQSFTPTYVAMKLLVDNWRWQGVPFYLRTGKRMPKKVTEIAIQFKTVPHLMFQSATQKVNSPNVLVLRIQPNEGVSLRFEVKTPGSSQRTRSVDMDFRYDTAFGSPTQEAYSRLLVDCMLGDQTLFTRADEVEASWRVVTPLLESWDDPRQAAGISFYEAGTWEPAEAEQLINRDGAVGVVSRIPATQLNSSGDV

SEQ ID NO: 383 - DNA, 1485 bp, Haemophilus influenzae
  CDS (1)..(1485)
atgcaaactgataataattgtatcgtcatttttggcgcgtctggtgacttaactcatcgtaaactcattccagccctttataatctctacaaaatcgggcgtttgagtgaaaacttttccgttcttggtgttgcacgttctgacttgaacgatgaaactttccgcgaaaaaatgcgtgaggcgttaattcataatgaagaaacaacaccagaaaccttagatgctttctgctctcatctttattaccaagcagtgaatacttcggatgctcaagattacggcaaacttgttccacgcttagacgatcttcacgataaatatcaaacctgtggtaacaccttttactatatgtccactccaccaagtctttatggcgtgattcctgagtgtttggctgcacatggtttaaatacggaagaatatggctggaaacgtattatcgttgaaaaaccttttggttacgatgaaaaaacagcgcaaacattagacgtacaaatccaccgtttctttgaagaacaccaaatttatcgtatcgatcattatttaggtaaagaaaccgttcaaaacttgctcgtattacgtttttcaaatggttggtttgaaccgctttggaaccgtaatttcattgattatgtagaaattactggtgcagaatctattggcgtggaagagcgcgggggctattatgatggttctggcgcaatgcgagatatgttccaaaaccatttattgcaagtgttagcgatggtggcaatggagccgccagcgattattaacgcgaattcaatgcgtgatgaagtagcaaaagtgatgcatagtttgcgtccattaacttcggaggatatggagaataaccttgttttgggtcaatacacagcggctgaaattaacggcaaaatggaaaaaggctatctagaagaaaaaggcgtaccggcaaattctcgtactgaaacctacatcgcattacgttgtgaaattgaaaactggcgttgggctggtgtgccgttctatgttcgtacgggtaaacgcttaccagctcgtgtgactgaaattgtgatccattttaaaactacgccacatcctgtattcagccaaaatgcaccagagaataaattaattattcgtattcaacctgatgaagcgatttcaatgcgttttggtttgaaaaaaccaggtgcaggttttgaggcgaaagaagtatcaatggatttccgttatgcagatttagcaggtgcgcaagtattaaccgcttatgaacgtttattgttggatgcgatgaaaggcgatgcaaccttgtttgctcgtactgatgctgtgcatgccgcatggaaatttgtgcaaccgattttagattacaaagccaatggtggtcgtattcacgaatatgaagctggcacttgggggcctgttgcagctgataaattaatcgcaaaacaaggcaaagtgtggcgtaaaccaagtggattgatgaagaaaaaagtttaa

SEQ ID NO: 384 - protein, 494 aa, Haemophilus influenzae
MQTDNNCIVIFGASGDLTHRKLIPALYNLYKIGRLSENFSVLGVARSDLNDETFREKMREALIHNEETTPETLDAFCSHLYYQAVNTSDAQDYGKLVPRLDDLHDKYQTCGNTFYYMSTPPSLYGVIPECLAAHGLNTEEYGWKRIIVEKPFGYDEKTAQTLDVQIHRFFEEHQIYRIDHYLGKETVQNLLVLRFSNGWFEPLWNRNFIDYVEITGAESIGVEERGGYYDGSGAMRDMFQNHLLQVLAMVAMEPPAIINANSMRDEVAKVMHSLRPLTSEDMENNLVLGQYTAAEINGKMEKGYLEEKGVPANSRTETYIALRCEIENWRWAGVPFYVRTGKRLPARVTEIVIHFKTTPHPVFSQNAPENKLIIRIQPDEAISMRFGLKKPGAGFEAKEVSMDFRYADLAGAQVLTAYERLLLDAMKGDATLFARTDAVHAAWKFVQPILDYKANGGRIHEYEAGTWGPVAADKLIAKQGKVWRKPSGLMKKKV

SEQ ID NO: 385 - DNA, 1446 bp, Neisseria meningitidis; identical to SEQ ID NO: 51
  CDS (1)..(1446)

SEQ ID NO: 386 - protein, 481 aa, Neisseria meningitidis; identical to SEQ ID NO: 52

SEQ ID NO: 387 - DNA, 1278 bp, Helicobacter pylori
  CDS (1)..(1278)
atgctggattttgatttggttctttttggcgcgactggggatttagccatgcgaaagctctttgtttcgctttatgaaatttatattcattatggttttaaaaacgattctaggattatcgcatcggggcgtaaggagctatccaatgaagagtttttagcgcttctttgtgaaaaaacacaactgcattcaagagaaaagggtgaggaatttttaacccatatcagttatttgcgcgtccgtttggataaccctaaagactttgaagaattgagtaaaatcgccacaaacaataagcccttgattttctacttttctatctcccctagtttttttgcaacgaccgctcaaaatttagcccaaaacgcgctcaatcacgctaacactcgtttgattctagaaaagcctttagggcatgatttaaagacttgtaaagagattttccaaagcattagcgctttttttaaagaagaacaaatttttagaatcgatcattatttagggaaaaagggcgttcaaaatatccttgaattgcgcctgaataaccctatcttaaacattttatgggatcaaatcagcgcggttgaaatctgcgtgtatgagactttaggggtggaagaaaggggcgaattttacgataaaatcggggctttaagggatatggttcaaaaccatctcttgcaagttttatcccttatcgctacagatttacccaacgatttaaaagatttgaggcaagaaaaaatcaaagttttaaagaccttacaaccccctaaagatttcacaaaacaggttattcgggcccaatatcaaggctatagagatgaaaataaggtccataaagagagccagacagagacttttgtcgctattaaagcctttttggatacgcccaaatttaaaggcgtgcctttctaccttaagcacgctaaaaaaatgccccgcaatcaagcgagtgtgaaaatccattttaatgcagtcaatacgctggaatttttcctctctcaagataaaatcaccctcaccctaaaagatcatcaaaacccccttattttagaaacccacaacaaacaagaatttttacagccctacgctaaattgctctatgatgcgataccaaataaccactataatttcgcccaccagttggaattagaagcgtcatgggtttttattgacacgctcatagagggttttatcaataacgctacgcccttatattcctatgaaagccacaatctcaacgaatcagaatttttaaaaccactctatcaataa

SEQ ID NO: 388 - protein, 425 aa, Helicobacter pylori
MLDFDLVLFGATGDLAMRKLFVSLYEIYIHYGFKNDSRIIASGRKELSNEEFLALLCEKTQLHSREKGEEFLTHISYLRVRLDNPKDFEELSKIATNNKPLIFYFSISPSFFATTAQNLAQNALNHANTRLILEKPLGHDLKTCKEIFQSISAFFKEEQIFRIDHYLGKKGVQNILELRLNNPILNILWDQISAVEICVYETLGVEERGEFYDKIGALRDMVQNHLLQVLSLIATDLPNDLKDLRQEKIKVLKTLQPPKDFTKQVIRAQYQGYRDENKVHKESQTETFVAIKAFLDTPKFKGVPFYLKHAKKMPRNQASVKIHFNAVNTLEFFLSQDKITLTLKDHQNPLILETHNKQEFLQPYAKLLYDAIPNNHYNFAHQLELEASWVFIDTLIEGFINNATPLYSYESHNLNESEFLKPLYQ

SEQ ID NO: 389 - DNA, 1434 bp, Xylella fastidiosa
  CDS (1)..(1434)
atgcacaacaccctcttattgtttggcgccaccggcgacctcgcccaacgctatctcttcccctccttactgcacctgtttactgatggcttattgccacaagacttccgcattcgtgctctggccttgtcgccccataacaccacacaattccgcgacatcctgcgcccgcgcttggaacaagcactacccatcgccaacactgcgcacatccaagccctactacaacgtgtcgactacctttccgtagacttgaacgacccaacatcaatcgccgaagcagtccgagatctgacggaacatccctgcatcagctacttggcaatcccaccaggcctgtacaccaacaccgccctaggattggcacagggaggggcactgcagacaccacaccgattgatgctggaaaaaccgatcggacgcgactcaataaacgcacgcgaaatcctaaacaccatcggcacactgattgacgaagatcgcatcttccgcgtagaccactatctaggcaaagcagcagtgcagaacctcgtcgcactgcgcttcggaaacaccctgctagaagcggtatggaaccgaaaccacattgagtcagtacacatcctcatcgccgaaaccgaaggcgtcgatggccgcaatgcttactacgcacgtgctggcgcactacgcgacatgatgcaaagccacatcctgcaactcctatgcctggtcgccatggaacccccggcctctctggaagccgaccgcatccgcgacgaaaaagtcaaaatcctgcgcgcactacgcccactgaacgcccaaaacgccgcaatgcacagcgtgcgtggacgctacagcgcgggcaccattaacagccaaccagtgccagcctatcaaccaccggaaggcagcaatgtagagacctttgtcggtgtcaccgcatacatcgacaactggcgctgggcgggcgtaccgttccacctatgcacaggaaaacgcttggccgaacgctcaacccagatcgtcgtcaccctcaaacccgtcacacactggctatttgaacgtccagaccggaacaatgcagcaccaaaccgcctgtgcttcaaactacagccccaggaaaatatcgaactaaacctgatgagcagcctggccggccccgaatggggaaccctggaactgcaaccgctggaattggagctatccgtcccgaccggaaaacatcgccacatcgcctatgagcgcctattcctcgacgcattcaacggcaacccggcgctatttgtacgtcacgacgaagtcacagccgcctgggattggatcgacagcgtcagcaatgcctgggaactgtccgacttaccactgcaaccctaccccgccggcagctggggcccacctcaagcccaccaatttctgccgccattggggattgatggccatggaaacgacgcatga

SEQ ID NO: 390 - protein, 477 aa, Xylella fastidiosa
MHNTLLLFGATGDLAQRYLFPSLLHLFTDGLLPQDFRIRALALSPHNTTQFRDILRPRLEQALPIANTAHIQALLQRVDYLSVDLNDPTSIAEAVRDLTEHPCISYLAIPPGLYTNTALGLAQGGALQTPHRLMLEKPIGRDSINAREILNTIGTLIDEDRIFRVDHYLGKAAVQNLVALRFGNTLLEAVWNRNHIESVHILIAETEGVDGRNAYYARAGALRDMMQSHILQLLCLVAMEPPASLEADRIRDEKVKILRALRPLNAQNAAMHSVRGRYSAGTINSQPVPAYQPPEGSNVETFVGVTAYIDNWRWAGVPFHLCTGKRLAERSTQIVVTLKPVTHWLFERPDRNNAAPNRLCFKLQPQENIELNLMSSLAGPEWGTLELQPLELELSVPTGKHRHIAYERLFLDAFNGNPALFVRHDEVTAAWDWIDSVSNAWELSDLPLQPYPAGSWGPPQAHQFLPPLGIDGHGNDA

SEQ ID NO: 391 - DNA, 1296 bp, Aquifex aeolicus; identical to SEQ ID NO: 53
  CDS (1)..(1296)

SEQ ID NO: 392 - protein, 431 aa, Aquifex aeolicus; identical to SEQ ID NO: 54

SEQ ID NO: 393 - DNA, 1491 bp, Thermotoga maritima; identical to SEQ ID NO: 55
  CDS (1)..(1491)

SEQ ID NO: 394 - protein, 496 aa, Thermotoga maritima; identical to SEQ ID NO: 56

SEQ ID NO: 395 - DNA, 1494 bp, Kluyveromyces marxianus; identical to SEQ ID NO: 59
  Kluyveromyces marxianus var. lactis, Candida sphaerica
  CDS (1)..(1494)

SEQ ID NO: 396 - protein, 497 aa, Kluyveromyces marxianus; identical to SEQ ID NO: 60
  Kluyveromyces marxianus var. lactis, Candida sphaerica

SEQ ID NO: 397 - DNA, 2813 bp, Erwinia chrysanthemi; identical to SEQ ID NO: 61
  CDS (322)..(1797)

SEQ ID NO: 398 - protein, 491 aa, Erwinia chrysanthemi; identical to SEQ ID NO: 62

SEQ ID NO: 399 - DNA, 3244 bp, Plasmodium falciparum
  CDS (184)..(2916)
tttataaattatttcataaatctaatatttatataatataggtttgtgttagtgtaattgtatgaatatataaatacattaatataatatatttaaataaaaacatataggatatatatattttatttatcacgtttattttatattacgtataaatacttgaaaggtataataaaaatcaaaatggattatgagaattttgtaaaaagtgcagaagaaataaataatttacacaatgtaaattatttggaaacaaaagacctgaatgattttaattggaaagcagcttattatatatgtaaagaaatatatgataagcaacaaattaataaagatggttatgttgtgataggtttatcgggaggtcgaactccgatagatgtttataaaaatatgtgtttaattaaagacattaagatagataaatctaaattaatattttttattattgatgaaaggtataaaagtgatgatcataaatttagtaattataataatataaaatttttatttcataatttaaatataaatgaaaaagaacaattatataaacctgacactaccaaaagtattgtagattgtatattagattataatgacaaaataaaaataatgatagagaaatataaaaaagttgatatagcaatattaggtatgggtagtgatttccatattgccagtttatttccaaatatattttataatatatatatgaataactatcaaaataattatatatataatgaaaaaacattagattttataaataatgatcaagataatgataatttaaaatatttgaaagaatatgtatattttacgacaacaaatcaatttgatgttaggaaaagaattacagtatctttaaatttattagctaatgcatcaagtaaaatatttttattaaattctaaagacaaattagatttatggaaaaatatgttgattaaatcatatattgaagtgaattataatttatatccagctacttatttaatagatacatcatgcaccaacgaaaatgttaatattaacaataacaacaataataataataagaataagaataattattgttatagtaataccactgttatatcttgtggttatgaaaattatacaaaatctattgaagaaatttatgattctaaatatgctctatctctttattctaatagtttgaataaagaagaattattaactataataatttttggctgttcaggtgatttagccaaaaaaaaaatatatccagctttatttaaattattttgtaataattccttaccaaaagatttattaatcattggatttgctagaacagttcaagatttcgatacattttttgataaaatagttatatatttaaaacgatgtttattatgttatgaagattggtctatatcaaaaaagaaggatcttttaaatggttttaaaaataggtgtcgatattttgttggtaattattcgtcttcagaaagttttgaaaattttaataaatatttaacaactattgaagaagaagaagcaaaaaaaaaatattatgcaacatgttataaaatgaatggttcagattataatatatcaaataatgttgcagaggataatattagtatagatgatgaaaataaaacaaatgaatattttcaaatgtgtactccaaaaaattgccctgataatgtattttcatcaaattataattttccatatgttataaatcgtatgttatatttagcattacctccacatatatttgttagtactttaaaaaattataaaaaaaattgtttaaatagtaaaggcactgataaaatattactagaaaaaccatttggaaatgatttagattcatttaaaatgttatcaaaacaaatattagagaattttaatgaacaacaaatatatagaatagatcattatttgggtaaggatatggtttcaggattgttgaaattaaaatttacaaatacatttttattatctttaatgaatagacattttataaaatgtattaaaattactcttaaagaaactaaaggtgtatatggtagaggacaatattttgatccctatggtattattagagatgttatgcaaaatcatatgttacaattattaacattaataactatggaagatcctatagatttaaatgatgaatctgtaaaaaatgagaaaataaaaattcttaaatcaattccttcgatcaaattagaagatactattattggacaatatgaaaaagctgaaaattttaaagaagatgaaaataatgatgatgaatcgaaaaaaaatcatagttatcatgatgatccacatatagataaaaattcgattactccaacattttgtacatgtatcttatatattaattcaattaattggtatggtgtaccaatcatttttaaatctggaaaaggtctgaataaagatatatgtgaaatacgtatacaattccataatattatggggtcgtctgatgaaaatatgaataataatgaatttgttattatattacaacctgttgaagctatatacctaaaaatgatgattaaaaaaacgggttgtgaagaaatggaagaagtacaattaaacctaacagtgaatgagaaaaataaaaaaattaatgtaccagaagcatatgaaacattactcttagaatgttttaaaggacacaaaaaaaaattcatctcagacgaggaattgtatgaatcatggagaatatttactcctttacttaaggaactccaggaaaaacaagtcaagcctcttaaatattcttttggatcatcaggccctaaagaggtatttggacttgtcaaaaaatattacaattatggtaaaaattatacgcacagacctgagtttgttagaaaatcctctttttatgaagacgatttgttagatattaattgatatatgtatatatttaaattaacaaattaacacccaatgaatatgaaaataatatatatatatatatatattatatgattgtttagtatattattatcttttataagataacataaatgtatatattatgacatatatatatatatatattatttcacttatctgcccacgaactttatttttgttttaaaattctagtataattaaataaaagaaaatatttggaacaatttgcattttttatgtataaataaaatttatataataatatactttcatacttactttttattttattttattttatttattttttaaatgtggaatt

SEQ ID NO: 400 - protein, 910 aa, Plasmodium falciparum
MDYENFVKSAEEINNLHNVNYLETKDLNDFNWKAAYYICKEIYDKQQINKDGYVVIGLSGGRTPIDVYKNMCLIKDIKIDKSKLIFFIIDERYKSDDHKFSNYNNIKFLFHNLNINEKEQLYKPDTTKSIVDCILDYNDKIKIMIEKYKKVDIAILGMGSDFHIASLFPNIFYNIYMNNYQNNYIYNEKTLDFINNDQDNDNLKYLKEYVYFTTTNQFDVRKRITVSLNLLANASSKIFLLNSKDKLDLWKNMLIKSYIEVNYNLYPATYLIDTSCTNENVNINNNNNNNNKNKNNYCYSNTTVISCGYENYTKSIEEIYDSKYALSLYSNSLNKEELLTIIIFGCSGDLAKKKIYPALFKLFCNNSLPKDLLIIGFARTVQDFDTFFDKIVIYLKRCLLCYEDWSISKKKDLLNGFKNRCRYFVGNYSSSESFENFNKYLTTIEEEEAKKKYYATCYKMNGSDYNISNNVAEDNISIDDENKTNEYFQMCTPKNCPDNVFSSNYNFPYVINRMLYLALPPHIFVSTLKNYKKNCLNSKGTDKILLEKPFGNDLDSFKMLSKQILENFNEQQIYRIDHYLGKDMVSGLLKLKFTNTFLLSLMNRHFIKCIKITLKETKGVYGRGQYFDPYGIIRDVMQNHMLQLLTLITMEDPIDLNDESVKNEKIKILKSIPSIKLEDTIIGQYEKAENFKEDENNDDESKKNHSYHDDPHIDKNSITPTFCTCILYINSINWYGVPIIFKSGKGLNKDICEIRIQFHNIMGSSDENMNNNEFVIILQPVEAIYLKMMIKKTGCEEMEEVQLNLTVNEKNKKINVPEAYETLLLECFKGHKKKFISDEELYESWRIFTPLLKELQEKQVKPLKYSFGSSGPKEVFGLVKKYYNYGKNYTHRPEFVRKSSFYEDDLLDIN

SEQ ID NO: 401 - DNA, 1785 bp, Medicago sativa; identical to SEQ ID NO: 65
  Medicago sativa (alfalfa)
  CDS (38)..(1585)

SEQ ID NO: 402 - protein, 515 aa, Medicago sativa; identical to SEQ ID NO: 66
  Medicago sativa (alfalfa)

SEQ ID NO: 403 - DNA, 1689 bp, Solanum tuberosum; identical to SEQ ID NO: 67
  Solanum tuberosum (potato)
  CDS (46)..(1581)

SEQ ID NO: 404 - protein, 511 aa, Solanum tuberosum; identical to SEQ ID NO: 68
  Solanum tuberosum (potato)

SEQ ID NO: 405 - DNA, 1530 bp, Synechocystis sp.; identical to SEQ ID NO: 69
  CDS (1)..(1530)

SEQ ID NO: 406 - protein, 509 aa, Synechocystis sp.; identical to SEQ ID NO: 70

SEQ ID NO: 407 - DNA, 1953 bp, Nicotiana tabacum; identical to SEQ ID NO: 73
  Nicotiana tabacum (common tobacco)
  CDS (43)..(1824)

SEQ ID NO: 408 - protein, 593 aa, Nicotiana tabacum; identical to SEQ ID NO: 74
  Nicotiana tabacum (common tobacco)

SEQ ID NO: 409 - DNA, 1869 bp, Nicotiana tabacum; identical to SEQ ID NO: 75
  Nicotiana tabacum (common tobacco)
  CDS (22)..(1788)

SEQ ID NO: 410 - protein, 588 aa, Nicotiana tabacum; identical to SEQ ID NO: 76
  Nicotiana tabacum (common tobacco)

SEQ ID NO: 411 - DNA, 2058 bp, Solanum tuberosum; identical to SEQ ID NO: 77
  Solanum tuberosum (potato)
  CDS (41)..(1774)

SEQ ID NO: 412 - protein, 577 aa, Solanum tuberosum; identical to SEQ ID NO: 78
  Solanum tuberosum (potato)

SEQ ID NO: 413 - DNA, 2049 bp, Spinacia oleracea; identical to SEQ ID NO: 79
  Spinacia oleracea (spinach)
  CDS (147)..(1871)

SEQ ID NO: 414 - protein, 574 aa, Spinacia oleracea; identical to SEQ ID NO: 80
  Spinacia oleracea (spinach)

SEQ ID NO: 415 - DNA, 2359 bp, Petroselinum crispum; identical to SEQ ID NO: 81
  Petroselinum crispum (parsley)
  CDS (172)..(1986)

SEQ ID NO: 416 - protein, 604 aa, Petroselinum crispum; identical to SEQ ID NO: 82
  Petroselinum crispum (parsley)

SEQ ID NO: 417 - DNA, 1848 bp, Petroselinum crispum; identical to SEQ ID NO: 83
  Petroselinum crispum (parsley)
  CDS (41)..(1528)

SEQ ID NO: 418 - protein, 495 aa, Petroselinum crispum; identical to SEQ ID NO: 84
  Petroselinum crispum (parsley)

SEQ ID NO: 419 - DNA, 1957 bp, Petroselinum crispum; identical to SEQ ID NO: 85
  Petroselinum crispum (parsley)
  CDS (74)..(1678)

SEQ ID NO: 420 - protein, 534 aa, Petroselinum crispum; identical to SEQ ID NO: 86
  Petroselinum crispum (parsley)

SEQ ID NO: 421 - DNA, 1569 bp, Caenorhabditis elegans; identical to SEQ ID NO: 87
  CDS (1)..(1569)

SEQ ID NO: 422 - protein, 522 aa, Caenorhabditis elegans; identical to SEQ ID NO: 88

SEQ ID NO: 423 - DNA, 1779 bp, Streptomyces coelicolor; identical to SEQ ID NO: 89
  CDS (1)..(1779)

SEQ ID NO: 424 - protein, 592 aa, Streptomyces coelicolor; identical to SEQ ID NO: 90

SEQ ID NO: 425 - DNA, 1524 bp, Streptomyces coelicolor; identical to SEQ ID NO: 91
  CDS (1)..(1524)

SEQ ID NO: 426 - protein, 507 aa, Streptomyces coelicolor; identical to SEQ ID NO: 92

SEQ ID NO: 427 - DNA, 1422 bp, Schizosaccharomyces pombe; identical to SEQ ID NO: 93
  CDS (1)..(1422)

SEQ ID NO: 428 - protein, 473 aa, Schizosaccharomyces pombe; identical to SEQ ID NO: 94

SEQ ID NO: 429 - DNA, 1503 bp, Schizosaccharomyces pombe; identical to SEQ ID NO: 95
  CDS (1)..(1503)

SEQ ID NO: 430 - protein, 500 aa, Schizosaccharomyces pombe; identical to SEQ ID NO: 96

SEQ ID NO: 431 - DNA, 1428 bp, Schizosaccharomyces pombe; identical to SEQ ID NO: 97
  CDS (1)..(1428)

SEQ ID NO: 432 - protein, 475 aa, Schizosaccharomyces pombe; identical to SEQ ID NO: 98

SEQ ID NO: 433 - DNA, 1461 bp, Leuconostoc mesenteroides
  CDS (1)..(1461)
atggtttcagaaatcaaaacgttggtaactttctttggcggaactggtgatttagcaaagcgtaagctttacccatcagttttcaacctctacaaaaaaggatacttacaagaacactttgccattgttgggacagcacgtcaacaattaagtgatgacgagtttaagcaattggttcgtgattcaattaaagactttactgaagatcaagcacaagccgaagcgtttattgcgcatttttcttaccgtgcgcacgatgtcacagatgccgcttcttatggtatcttgaagtcagcgatcgaagaagcagcaaccaaatttgacattgatggcaatcgtattttctatatgtcagttgcccctcgtttcttcggtacaatcgctaaatatttgaaatcagaaggtttgctagctgagactggctacaatcgtttgatgattgaaaagccttttggtacatcatacgccaccgcagaagaattgcaaagtgatttggaaaatgcatttgatgatgaccaactgttccgtattgaccactatcttggaaaagaaatggtacaaaatattgcagcattacgttttggtaacccaatctttgatgccgcttggaataaggactatatcaaaaacgtacaagtaactttggctgaagttctaggtgttgaagagcgtgctggttactacgataccactggcgcccttttggatatgattcaaaaccacacaatgcaaattgttggttggttagcaatggaaaaacctgaatcattcaatgataaggatatccgtgcagctaaaaacgccgccttcaatgcattaaagatttataacgaagaagaagtgaataagtacttcgttcgtgcacaatatggtgctggtgatacagctgattacaagccatatttggaagaagcagatgtccctgctgactcaaagaacaacacattcattgctggtgaattgcagttcgatttgccacgttgggaaggtgttcctttctatgttcgttcaggtaagcgtttggctgccaagcaaacacgtgttgatattgtatttaaggctggcacattcaactttggttcagaacaagaagcacaagaatcagtactctcaatcatcattgatccaaagggtgctattgaattgaagcttaacgctaagtcagttgaagatgccttcaacacccgcacaatcaacttggattgggcagtatctgatgaagacaagaagaacacaccagaaccatacgaacgtatgattcacgatacaatgaatggtgacggatcaaactttgctgattggaacggtgtatcaattgcttggaagtttgttgacgcaattactgccgtttacgatgcagataaagcaccattggagacatataagtcaggttcaatgggtcctgaagcatcagacaagctattagctgaaaatggcgatgcttgggtatttaaaggatag

SEQ ID NO: 434 - protein, 486 aa, Leuconostoc mesenteroides; identical to SEQ ID NO: 102

SEQ ID NO: 435 - DNA, 3038 bp, Corynebacterium glutamicum
  CDS (115)..(1659)
cctgaagtagaatcagcacgctgcatcagtaacggcgacatgaaatcgaattagttcgatcttatgtggccgttacacatctttcattaaagaaaggatcgtgacactaccatcatgagcacaaacacgaccccctccagctggacaaacccactgcgcgacccgcaggataaacgactcccccgcatcgctggcccttccggcatggtgatcttcggtgtcactggcgacttggctcgaaagaagctgctccccgccatttatgatctagcaaaccgcggattgctgcccccaggattctcgttggtaggttacggccgccgcgaatggtccaaagaagactttgaaaaatacgtacgcgatgccgcaagtgctggtgctcgtacggaattccgtgaaaatgtttgggagcgcctcgccgagggtatggaatttgttcgcggcaactttgatgatgatgcagctttcgacaacctcgctgcaacactcaagcgcatcgacaaaacccgcggcaccgccggcaactgggcttactacctgtccattccaccagattccttcacagcggtctgccaccagctggagcgttccggcatggctgaatccaccgaagaagcatggcgccgcgtgatcatcgagaagcctttcggccacaacctcgaatccgcacacgagctcaaccagctggtcaacgcagtcttcccagaatcttctgtgttccgcatcgaccactatttgggcaaggaaacagttcaaaacatcctggctctgcgttttgctaaccagctgtttgagccactgtggaactccaactacgttgaccacgtccagatcaccatggctgaagatattggcttgggtggacgtgctggttactacgacggcatcggcgcaccgcgcgacgtcatccagaaccacctgatccagctcttggctctggttgccatggaagaaccaatttctttcgtgccagcggcacggcaggcagaaaagatcaaggtgctctctgcgacaaagccgtgctacccattggataaaacctccgctcgtggtcagtacgctgccggttggcagggctctgagttagtcaagggacttcgcgaagaagatggcttcaaccctgagtccaccactgagacttttgcggcttgtaccttagagatcacgtctcgtcgctgggctggtgtgccgttctacctgcgcaccggtaagcgtcttggtcgccgtgttactgagattgccgtggtgtttaaagacgcaccacaccagcctttcgacggcgacatgactgtatcccttggccaaaacgccatcgtgattcgcgtgcagcctgatgaaggtgtgctcatccgcttcggttccaaggttccaggttctgccatggaagtccgtgacgtcaacatggacttctcctactcagaatccttcactgaagaatcacctgaagcatacgagcgcctcattttggatgcgctgttagatgaatccagcctcttccctaccaacgaggaagtggaactgagctggaagattctggatccaattcttgaagcatgggatgccgatggagaaccagaggattacccagcgggtacgtggggtccaaagagcgctgatgaaatgctttcccgcaacggtcacacctggcgcaggccataatttaggggcaaaatgatctttgaacttccggataccaccacccagcaaatttccaagaccctaactcgactgcgtgaatcgggcacccaggtcaccaccggccgagtgctcaccctcatcgtggtcactgactccgaaagcgatgtcgctgcagttaccgagtccaccaatgaagcctcgcgcgagcacccatctcgcgtgatcattttggtggttggcgataaaactgcagaaaacaaagttgacgcagaagtccgtatcggtggcgacgctggtgcttccgagatgatcatcatgcatctcaacggacctgtcgctgacaagctccagtatgtcgtcacaccactgttgcttcctgacacccccatcgttgcttggtggccaggtgaatcaccaaagaatccttcccaggacccaattggacgcatcgcacaacgacgcatcactgatgctttgtacgaccgtgatgacgcactagaagatcgtgttgagaactatcacccaggtgataccgacatgacgtgggcgcgccttacccagtggcggggacttgttgcctcctcattggatcacccaccacacagcgaaatcacttccgtgaggctgaccggtgcaagcggcagtacctcggtggatttggctgcaggctggttggcgcggaggctgaaagtgcctgtgatccgcgaggtgacagatgctcccaccgtgccaaccgatgagtttggtactccactgctggctatccagcgcctggagatcgttcgcaccaccggctcgatcatcatcaccatctatgacgctcatacccttcaggtagagatgccggaatccggcaatgccccatcgctggtggctattggtcgtcgaagtgagtccgactgcttgtctgaggagcttcgccacatggatccagatttgggctaccagcacgcactatccggcttgtccagcgtcaagctggaaaccgtctaaggagaaatacaacactatggttgatgtagtacgcgcacgcatactgaagatttggttgcacaggctgcctccaaattcattgaggttgttgaagcagcaactgccaataatggcaccgcacaggtagtgctcaccggtggtggcgccggcatcaagttgctggaaaagctcagcgttgatgcggctgaccttgcctgggatcgcattcatgtgttcttcggcgatgagcgcaatgtccctgtcagtgattctgagtccaatgagggccaggctcgtgaggcactgttgtccaaggtttctatccctgaagccaacattcacggatatggtctcggcgacgtagatcttgcagaggcagcccgcgcttacgaagctgtgttggatgaattcgcaccaaacggctttga

SEQ ID NO: 436 - protein, 514 aa, Corynebacterium glutamicum
MSTNTTPSSWTNPLRDPQDKRLPRIAGPSGMVIFGVTGDLARKKLLPAIYDLANRGLLPPGFSLVGYGRREWSKEDFEKYVRDAASAGARTEFRENVWERLAEGMEFVRGNFDDDAAFDNLAATLKRIDKTRGTAGNWAYYLSIPPDSFTAVCHQLERSGMAESTEEAWRRVIIEKPFGHNLESAHELNQLVNAVFPESSVFRIDHYLGKETVQNILALRFANQLFEPLWNSNYVDHVQITMAEDIGLGGRAGYYDGIGAPRDVIQNHLIQLLALVAMEEPISFVPAARQAEKIKVLSATKPCYPLDKTSARGQYAAGWQGSELVKGLREEDGFNPESTTETFAACTLEITSRRWAGVPFYLRTGKRLGRRVTEIAVVFKDAPHQPFDGDMTVSLGQNAIVIRVQPDEGVLIRFGSKVPGSAMEVRDVNMDFSYSESFTEESPEAYERLILDALLDESSLFPTNEEVELSWKILDPILEAWDADGEPEDYPAGTWGPKSADEMLSRNGHTWRRP

SEQ ID NO: 437 - DNA, 1852 bp, Nicotiana tabacum; identical to SEQ ID NO: 107
  CDS (102)..(1634)

SEQ ID NO: 438 - protein, 510 aa, Nicotiana tabacum; identical to SEQ ID NO: 108

SEQ ID NO: 439 - DNA, 1821 bp, Nicotiana tabacum; identical to SEQ ID NO: 109
  CDS (88)..(1623)

SEQ ID NO: 440 - protein, 511 aa, Nicotiana tabacum; identical to SEQ ID NO: 110

SEQ ID NO: 441 - DNA, 1808 bp, Chlamydia trachomatis
  CDS (105)..(1643)
taggacccctcatggcaaagccatgttttatgagagagaaatctttttaggcacatattcgtttttttggtattgtgggctctctcttaaaaaattaacactctatgctaggttgtaccttggaagaaattaaagactttggccccacattaccagcctgccctccctgtatcgtggttatttttggtgctacaggagacttgacctctaggaagctctttcctgctttatacaatttaacaaaggaaggacgtctatccgaaaactttgtttgtgttgggtttgctaggcgacctaagtctcatgagcaatttctcgaagaaatgaagcttgccgttcagcatttctctcactcatcggaaatagatattcgagtttgggaaagtctggaaaatagaatcttttaccaccaagctaatttttctgatgccgaaggctactctgctctgaaagcttatttggagcaactagatcaacaatatggaacacaagggaatcgtcttttttatttatcaacaccaccagattatttccaggaaatcatccgcaatttaaatcggcatcagctattctatcatgaacaaggagcacaacagccttggtctcggctaattatagaaaagccttttggagttaatttagaaacagctcgagagcttcaacaatgcattgatgccaatattgatgaagagtcggtttatcgaatagaccattatttaggaaaagaaacggttcaaaacattctgactattcgttttgctaatactctctttgagtcttgctggaattctcagtacatagatcatgtgcaaatcagcgttagcgaatcaattggtataggatctcgagggaatttcttcgaaaagtcgggcatgctacgagacatggtacagaatcatttgacgcagctgctatgtctactgactatggaacctccttctgaattttcttcagaagaaataaaaaaagaaaaaattaaaattctaaagaaaattcttcctatccgcgaagaagatgctgttcgtggccaatatggtgaagggattgtgcaagatgtttcagttctgggctatcgggaggaagaaaatgtcgatccgaattcttcagtagaaacctacgttgcattaaaattatttatcgacaatcctcgctggaaaggggttcccttttacttacaagcagggaaacgtcttactaaaagaacaacagatatcgctgtgatctttaaaaaatccagctacaatttattcaatgcagagaattgtcctttgtgtccgttagaaaatgatttacttattattcgtattcaaccggatgaaggtgttgcgctacaatttaactgcaaggttccaggaacaaataagctcgtacgtcctgtaaaaatggacttccgttacgacagctattttaatactgttactcccgaagcttatgaacggttactgtgcgactgtatccttggggacagaacgctattcactagcaatgaagaagtcttagcatcttgggaactattttctcctctattagaaaaatggtctcaagtacaccctatattccctaactatatggccggatctttacgtcctcaagaagctgatgaactattatctagagatggaaaagcttggcggccctattaatttgttttgcaagaggttatatacatggctacccttattagctaaatgatgcgaatagaatgcttatcgctgactctcaagaagagtttttacaaatcgcatgttatgattggatctctacagcaaataaagcgattcacaaacgcggtgcattctatgtcgctc

SEQ ID NO: 442 - protein, 512 aa, Chlamydia trachomatis; identical to SEQ ID NO: 112

SEQ ID NO: 443 - DNA, 2750 bp, Plasmodium falciparum
  CDS (48)..(2258)
atttccatattgccagtttatttccaaatatattttataatatatatatgaataactatcaaaataattatatatataatgaaaaaacattagattttataaataatgatcaagataatgataatttaaaatatttgaaagaatatgtatattttacgacaacaaatcaatttgatgttaggaaaagaattacagtatctttaaatttattagctaatgcatcaagtaaaatatttttattaaattctaaagacaaattagatttatggaaaaatatgttgattaaatcatatattgaagtgaattataatttatatccagctacttatttaatagatacatcatgcaccaacgaaaatgttaatattaacaataacaacaataataataataagaataagaataattattgttatagtaataccactgttatatcttgtggttatgaaaattatacaaaatatattgaagaaatttatgattctaaatatgctctatctctttattctaatagtttgaataaagaagaattattaactataataatttttggctgttcaggtgatttagccaaaaaaaaaatatatccagctttatttaaattattttgtaataattccttaccaaaagatttattaatcattggatttgctagaacagttcaagatttcgatacattttttgataaaatagttatatatttaaaacgatgtttattatgttatgaagattggtctatatcaaaaaagaaggatcttttaaatggttttaaaaataggtgtcgatattttgttggtaattattcgtcttcagaaagttttgaaaattttaataaatatttaacaactattgaagaagaagaagcaaaaaaaaaatattatgcaacatgttataaaatgaatggttcagattataatatatcaaataatgttgcagaggataatattagtatagatgatgaaaataagacaaatgaatattttcaaatgtgtactccaaaaaattgccctgataatgtattttcatcaaattataattttccatatgttataaatagtatattatatttagcattacctccacatatatttattagtactttaaaaaaaattataaaaaaaaattgtttaaatagtaaaggcactgataaaatattactagaaaaaccatttggaaatgatttagattcatttaaaatgttatcaaaacaaatattagagaattttaatgaacaacaaatatatagaatagatcattatttgggtaaggatatggtttcaggattgttgaaattaaaatttacaaatacatttttattatctttaatgaatagacattttataaaatgtattaaaattactcttaaagaaactaaaggtgtatatggtagaggacaatattttgatccctatggtattattagagatgttatgcaaaatcatatgttacaattattaacattaataactatggaagatcctatagatttaaatgatgaatctgtaaaaaatgagaaaataaaaattcttaaatcaattccttcgatcaaattagaagatactattattggacaatatgaaaaagctgaaaattttaaagaagatgaaaataatgatgatgaatcgaaaaaaaatcatagttatcatgatgatccacatatagataaaaattcgattactccaacattttgtacatgtatcttatatattaattcaattaattggtatggtgtaccaatcatttttaaatctggaaaaggtctgaataaagatatatgtgaaatacgtatacaattccataatattatggggtcgtctgatgaaaatatgaataataatgaatttgttattatattacaacctgttgaagctatatacctaaaaatgatgattaaaaaaacgggttgtgaagaaatggaagaagtacaattaaacctaacagtgaatgagaaaaataaaaaaattaatgtaccagaagcatatgaaacattactcttagaatgttttaaaggacataaaaaaaaattcatctcagacgaggaattgtatgaatcatggagaatatttactcctttacttaaggaactccaggaaaaacaagtcaagcctcttaaatattcttttggatcatcaggccctaaagaggtatttggacttgtcaaaaaatattacaattatggtaaaaattatacgcacagacctgagtttgttagaaaatcctctttttatgaagacgatttgttagatattaattattaattgatatatgtatatatttaaattaaccaaattaacacccaatgaatatgaaaataatatatatatatatatatatattatatgattgtttagtatattattacctatcttttataagataacataaatgtatatattatgacatatatatatatatatatatattatttcacttatctgcccacgaactttatttttgttttaaaattctagtataattaaataaaagaaaatatttggaacaatttgcattttttatgtataaataaaatttatataataatatactttcatacttactttttattttattttattttatttattttttaaatgtctattatatatacatataaatgcgttttcaaataaataataaaaacccatgtttaactaataatattacaaatagaactcaaaaaaaaaaaaaataattatacaatgaattaaagctttttaatatatttttaatggtatctccagactttagag

SEQ ID NO: 444 - protein, 736 aa, Plasmodium falciparum
MNNYQNNYIYNEKTLDFINNDQDNDNLKYLKEYVYFTTTNQFDVRKRITVSLNLLANASSKIFLLNSKDKLDLWKNMLIKSYIEVNYNLYPATYLIDTSCTNENVNINNNNNNNNKNKNNYCYSNTTVISCGYENYTKYIEEIYDSKYALSLYSNSLNKEELLTIIIFGCSGDLAKKKIYPALFKLFCNNSLPKDLLIIGFARTVQDFDTFFDKIVIYLKRCLLCYEDWSISKKKDLLNGFKNRCRYFVGNYSSSESFENFNKYLTTIEEEEAKKKYYATCYKMNGSDYNISNNVAEDNISIDDENKTNEYFQMCTPKNCPDNVFSSNYNFPYVINSILYLALPPHIFISTLKKIIKKNCLNSKGTDKILLEKPFGNDLDSFKMLSKQILENFNEQQIYRIDHYLGKDMVSGLLKLKFTNTFLLSLMNRHFIKCIKITLKETKGVYGRGQYFDPYGIIRDVMQNHMLQLLTLITMEDPIDLNDESVKNEKIKILKSIPSIKLEDTIIGQYEKAENFKEDENNDDESKKNHSYHDDPHIDKNSITPTFCTCILYINSINWYGVPIIFKSGKGLNKDICEIRIQFHNIMGSSDENMNNNEFVIILQPVEAIYLKMMIKKTGCEEMEEVQLNLTVNEKNKKINVPEAYETLLLECFKGHKKKFISDEELYESWRIFTPLLKELQEKQVKPLKYSFGSSGPKEVFGLVKKYYNYGKNYTHRPEFVRKSSFYEDDLLDINY

SEQ ID NO: 445 - DNA, 1509 bp, Debaryomyces hansenii
  CDS (1)..(1509)
atgtcagtagaaccatttggtaaacacgttaccattgtcgtctttggggcctctggtgatttagctaagaagaagacgttcccagcattatttggattattccgtgaaggagaattgccatcaacgatcaaggtgattgggtatgcaagatcagaattatcagatgctgactttaaggaaagaatatcagccaatttcaagggcgttaatgatagtaacaagcataaggtcgacgaattcttgaacttgtgttcttatactcaaggtcaatacgattccgcagaaggttttaaaaagttgaatgaggagatggaaaagtatgaaaaagattccggtgttgacaaacctgaaagattgttctacttggctttacctccatcggtattcgtcactgttgcaagtcatataaaggaaaatgcctacaccaaaactggtgaggttagattaattgtcgaaaagccgtttggtaatgacttggaatcttctaggaagttgcaaaagagcttggccccattgttcacagaagaagaattgtatagaattgaccactacttaggaaaggaaatggttaagaacttggtatttttaagatttagtaatgaatttcttaacgcttcatggaacaaaaaccacatcaagtcgatccagatatctttcaaggaagcttttggtactgaaggtagaggtggttatttcgatgatattggaattgttagagatgtcatgcaaaaccatttgttgcaagttttgactttgttaactatggaaagaccagtctctattgaccctgaagctatcagagatgaaaaggtcaaggtcttgaaagcatttggtgaactcgaaactgatgacatcttattgggacaatatactaagtccgaagatggaaccaaaccaggttacttagatgatgacactgttaaaggtgactccaagtgtgttacatatgctgcacttggtatgcaaatccacaatgaaagatgggaaggtgttccaattgttatgagagctggtaaggctttgaaagaatctaaggttgaaattagaattcaattcaaggaagtggctaagggtatgttcaatgacattcaaagaaatgaattagttatgagaattcaaccaaatgaagccgtctatatgaaaatcaattctaagatcccaggtatttctgctgttccttctgttaccgacttggatttaacatactcatctagatactctaaggaattttggatcccagaggcttacgaatcattaattagagactgttacttaggtaaccatgctaatttcgtcagagacgatgaattggatctttcatggaagttgttcactccattgttacagcacatcgaatcaaaggatggcccaacacctgaaccttatccttatggttctaacggtccaaagaatttgagacctttcttatctgatcacggttataacttctacgatgaaggcacttatgaatggcctttaaccaccccaaatgttaagggtaaaatgtaa

SEQ ID NO: 446 - protein, 502 aa, Debaryomyces hansenii
MSVEPFGKHVTIVVFGASGDLAKKKTFPALFGLFREGELPSTIKVIGYARSELSDADFKERISANFKGVNDSNKHKVDEFLNLCSYTQGQYDSAEGFKKLNEEMEKYEKDSGVDKPERLFYLALPPSVFVTVASHIKENAYTKTGEVRLIVEKPFGNDLESSRKLQKSLAPLFTEEELYRIDHYLGKEMVKNLVFLRFSNEFLNASWNKNHIKSIQISFKEAFGTEGRGGYFDDIGIVRDVMQNHLLQVLTLLTMERPVSIDPEAIRDEKVKVLKAFGELETDDILLGQYTKSEDGTKPGYLDDDTVKGDSKCVTYAALGMQIHNERWEGVPIVMRAGKALKESKVEIRIQFKEVAKGMFNDIQRNELVMRIQPNEAVYMKINSKIPGISAVPSVTDLDLTYSSRYSKEFWIPEAYESLIRDCYLGNHANFVRDDELDLSWKLFTPLLQHIESKDGPTPEPYPYGSNGPKNLRPFLSDHGYNFYDEGTYEWPLTTPNVKGKM

SEQ ID NO: 447 - DNA, 1503 bp, Candida glabrata
  CDS (1)..(1503)
atgtcagaacctgttaagtttgagaagaataccgttgttgtggtgtttggtgcttctggtgatttggccaagaagaagactttcccagctttgtttggtttgttcagagaaggatacctgcacgaatccaccaagattatcggttatgcgcgttccagtcttaccgttgaggaattgactgagcgtatcaagcctcacttgaagactccaaggggtaaggaggacgaggccaagattccacagttcttcaagctgctgacctatgtctccggtccttacgaccaggacgacggtttcatccgcttgcgtgagcagattgagaccttcgaaggtgccaagtgctccaccgtgccacacagactgttctacttcgctttgccaccaagcgtgttcttgccagtcgccaccaacattaagcgtctggtgtacgccgaaaacggtgtcactagactgatcgtggagaagccatttggtagagatctagagaccgctagaaagctacaagccgacttgagtccattgttcaaagaagaagaaatctacagaattgaccattacttgggtaaggaattggtcaagaacttgctagtcatgagattcggtaaccagttcttgaacagtgcttggaacagagacaacatccaatccattcagatctccttcaaagaacctttcggtaccgagggccgtggtggttacttcgataacatcggtatcataagagacgtcatgcaaaaccacttgttgcaagtgttgactttgttgaccatggagagacctgtctccttcgacccagaagccatccgtgacgagaaggttaaggtcctaaaagctatggctccattcgaccctaaggacatcttgatcggtcaatacggtaagtccgaagatggctctaagccagcttacttggatgacgaaaccgttaagccaggctccaagtgtgtcaccttcgccgccatcgccttccaaatcgaaaacgaacgttgggaaggtgttccaatcgttatgagagctggtaaagctcttaacgagggtaaagtagaaatcagactgcaatacaaggctgtcgcttccggtgtattcaagaacatcccacacaacgaattggttatcagaattcaaccaaatgaagccgtttacatgaaattcaacgccaagacaccaggtctgtcaaacgctactcaagtcactgacctagacttgacttactcttccagatacaaggacttctggatcccagaagcttacgaagctttgatcagagatgctctattgggtgaccactctaatttcgttagagatgatgagcttgatgtcagttggagtttattcacacctctattgaactacctagaaggaccagatgctcctcaaccagaaatatatccatacggttcaagaggtccaagcggtctaagggactacttgaagaagcacaattacatgatcgaggaaaagcacccatacacttggccagtcaccactccagatgaggattaa

SEQ ID NO: 448 - protein, 500 aa, Candida glabrata
MSEPVKFEKNTVVVVFGASGDLAKKKTFPALFGLFREGYLHESTKIIGYARSSLTVEELTERIKPHLKTPRGKEDEAKIPQFFKLLTYVSGPYDQDDGFIRLREQIETFEGAKCSTVPHRLFYFALPPSVFLPVATNIKRLVYAENGVTRLIVEKPFGRDLETARKLQADLSPLFKEEEIYRIDHYLGKELVKNLLVMRFGNQFLNSAWNRDNIQSIQISFKEPFGTEGRGGYFDNIGIIRDVMQNHLLQVLTLLTMERPVSFDPEAIRDEKVKVLKAMAPFDPKDILIGQYGKSEDGSKPAYLDDETVKPGSKCVTFAAIAFQIENERWEGVPIVMRAGKALNEGKVEIRLQYKAVASGVFKNIPHNELVIRIQPNEAVYMKFNAKTPGLSNATQVTDLDLTYSSRYKDFWIPEAYEALIRDALLGDHSNFVRDDELDVSWSLFTPLLNYLEGPDAPQPEIYPYGSRGPSGLRDYLKKHNYMIEEKHPYTWPVTTPDED

SEQ ID NO: 449 - DNA, 1485 bp, Bacillus thuringiensis
  Bacillus thuringiensis serovar konkukian str
  CDS (1)..(1485)
atggaatcaatgacctttgttttatttggagcgacaggggacttagcgaaacgcaaaatttaccccgcactatataacttatatagagatcaaaagcttccaaagcaaatatccgttatcgggcttgggagacgtgaagtatctcatgtagatttccaaaaaagaataaaagaatcaatagagacgttttctcgtcatagagaagaaggtactccagaactcgaagattttttagataattttcgctattgtccattagatgtgagtaagccggaagactatgagagattattacaagtcgttcgtgaaagggaagaagagctacatataaaagggaatagaatgttctatctttctgttgctcctgaattttttgagacaatcgctttaaatattaaggaaagcggacttgataaaacggatggatggaaacgcctaatgattgagaaaccgttcgggcacgatcttacatctgctcgtgagctgaatgataagcttagtcgcacgtttgaagaagacgagatataccgtattgatcattatttaggtaagccgatgattcaaaaccttgaagcactagagtttgcaaatcctgttttacaatcgatttggaataaagaacatatagcgaatgtacaaatcacagcgagtgaaacagttggggttgaagaaagggcaggatattatgatcaggcaggagccattcgagatatggttcaaaatcatatgttacaaatattaatgatgactgctatgaatttgccggaaaaggttaatgcatgtgaaattcgagaggaaaagcgaaaggtaatggaggcgcttcgtaaagtgaaaaaagaagacgttcaaaaccatatcattcgcggacaatatggtgcaggtgagataaatggcgggcaagttgtagcatataaagaggagccaggagtaaatccttcttctaatatagacacatttgttgctgctcgcttgtggatcgataatccattttggactggcgttcccttttatatacgaacaggcaaacgaatgaaagaaaagtctactcgtattgtaatcgaatttaaaaatacgttaaaacagcaatatcaagatagtaatccaaatgcagcacctaacttgttaataattgaaattagcccaggtgagaacgtttcattacagttaaatagtaaaaatccattgaaaaatggagaaattgaaccgatccgtattaactttacttgtgagcaagcggatgtgggagtacctgaagcgtatgaaagactcattcatgatgctgtgagtggagacgctacattctttgcacattggagagaagttgaattgtcatgggaatgggtacaaccaattcttgaagcattcgaggaaaacttattaccacttcatgaatatgagtctggttcacatggtccagaggcatctaatgaattattgcaagaaagtggatttaaatggtggttagatcaagaaacgaaaaaataa

SEQ ID NO: 450 - protein, 494 aa, Bacillus thuringiensis
  Bacillus thuringiensis serovar konkukian str
MESMTFVLFGATGDLAKRKIYPALYNLYRDQKLPKQISVIGLGRREVSHVDFQKRIKESIETFSRHREEGTPELEDFLDNFRYCPLDVSKPEDYERLLQVVREREEELHIKGNRMFYLSVAPEFFETIALNIKESGLDKTDGWKRLMIEKPFGHDLTSARELNDKLSRTFEEDEIYRIDHYLGKPMIQNLEALEFANPVLQSIWNKEHIANVQITASETVGVEERAGYYDQAGAIRDMVQNHMLQILMMTAMNLPEKVNACEIREEKRKVMEALRKVKKEDVQNHIIRGQYGAGEINGGQVVAYKEEPGVNPSSNIDTFVAARLWIDNPFWTGVPFYIRTGKRMKEKSTRIVIEFKNTLKQQYQDSNPNAAPNLLIIEISPGENVSLQLNSKNPLKNGEIEPIRINFTCEQADVGVPEAYERLIHDAVSGDATFFAHWREVELSWEWVQPILEAFEENLLPLHEYESGSHGPEASNELLQESGFKWWLDQETKK

SEQ ID NO: 451 - DNA, 1554 bp, Oryza sativa
  CDS (1)..(1554)
atgtcaggaggatctggtgattcttccccttcatcagggcgggctagcttcagttctttgtcaggtttgaaggacctagaactgtcttcagagtctggttgcttgtccattgtggtcctaggtgcttctggagaccttgctaagaagaaaacattcccagcgctgtttcacctctttcagcagggatttctacaatctggagaagtccatatatttgggtatgcaagatcaaatatttcggatgatggattaagagaacgcattcgtggatacctcaaaggagcttcagatgaacatatttcacaatttttgcaattaattaaatatgttagtggttcctacaatagcggggaaggatttgcatcattaaataacgccatttcagagaatgaaacttcgaagaacaacaaaccaggaagctcacgtagactattttatttggcattgcctccatcagtctacccctcagtatgcaaaatgataagatcatactgcatgaatccatcttctcattctggctggacaagggttattgttgaaaagccctttgggaaggacttggagtctgcagaggaactcagtgcccagcttggagagctgtttaatgaacaacagctgtacagaattgaccactatttaggaaaagaattggtccaaaatctgcttgtgcttcgctttgcaaaccgtttgttcctacctctttggaatcgtgataacattgctaatgtacagattgtattcagagaggactttgggactgaaggacgtggagggtactttgatcaatatggcatcattcgtgatatcattcagaaccatttgttgcaggtcttctgtttggtggctatggaaaagcctgtctctcttaagcctgagcacataagagatgaaaaagtcaaggttcttcagtcagtgacacctataaagcatgatgaggtggtccttgggcaatatgatggctacaaggatgactctacggtaccagatgactccaacacacctacttttgcatctcttgtattgagggtaaacaatgaaagatgggaaggagttcctttcattctcaaggctggcaaagcactgaacaataggaaagcagagatacgtgtgcagttcaaggatgctcctggtgacatttttaaatgcaagaagcaaggaaggaatgaattcgttatacggttgcagccatcggaagccatgtatatgaaattaactgtcaagaaacccggactagaaatggcaaccgaacaaagcgagctggatctgtcatatgggctacgctaccaagacgtgaagatcccagaagcgtatgaacgcctcatcctggatacgataagaggggatcagcagcactttgttcgccgagacgaactgaaggctgcgtgggagatcttcactccgctgctgcacgacatcgacgacggcaaggtgaaggccctgccgtacaagccgggaacccggggacccccagaggccgacgagctgagcaagaggatgggctacgtgcagacccatggctacgtttggatacctccaaccctttcaaaattctag

SEQ ID NO: 452 - protein, 517 aa, Oryza sativa
MSGGSGDSSPSSGRASFSSLSGLKDLELSSESGCLSIVVLGASGDLAKKKTFPALFHLFQQGFLQSGEVHIFGYARSNISDDGLRERIRGYLKGASDEHISQFLQLIKYVSGSYNSGEGFASLNNAISENETSKNNKPGSSRRLFYLALPPSVYPSVCKMIRSYCMNPSSHSGWTRVIVEKPFGKDLESAEELSAQLGELFNEQQLYRIDHYLGKELVQNLLVLRFANRLFLPLWNRDNIANVQIVFREDFGTEGRGGYFDQYGIIRDIIQNHLLQVFCLVAMEKPVSLKPEHIRDEKVKVLQSVTPIKHDEVVLGQYDGYKDDSTVPDDSNTPTFASLVLRVNNERWEGVPFILKAGKALNNRKAEIRVQFKDAPGDIFKCKKQGRNEFVIRLQPSEAMYMKLTVKKPGLEMATEQSELDLSYGLRYQDVKIPEAYERLILDTIRGDQQHFVRRDELKAAWEIFTPLLHDIDDGKVKALPYKPGTRGPPEADELSKRMGYVQTHGYVWIPPTLSKF

SEQ ID NO: 453 - DNA, 1500 bp, Photobacterium profundum; identical to SEQ ID NO: 315
  CDS (1)..(1500)

SEQ ID NO: 454 - protein, 499 aa, Photobacterium profundum; identical to SEQ ID NO: 316

SEQ ID NO: 455 - DNA, 1551 bp, Parachlamydia sp; identical to SEQ ID NO: 313
  CDS (1)..(1551)

SEQ ID NO: 456 - protein, 516 aa, Parachlamydia sp; identical to SEQ ID NO: 314

SEQ ID NO: 457 - DNA, 1515 bp, Rhodopseudomonas palustris; identical to SEQ ID NO: 307
  CDS (1)..(1515)

SEQ ID NO: 458 - protein, 504 aa, Rhodopseudomonas palustris; identical to SEQ ID NO: 308

SEQ ID NO: 459 - DNA, 1650 bp, Corynebacterium diphtheriae; identical to SEQ ID NO: 309
  CDS (1)..(1650)

SEQ ID NO: 460 - protein, 549 aa, Corynebacterium diphtheriae; identical to SEQ ID NO: 310

SEQ ID NO: 461 - DNA, 1446 bp, uncultured bacterium 581
  CDS (1)..(1446)
atgaccggagtcgacctaattatttttggcgcttccggagacctttcagcaagaaagctctttcccgcactgtttcaactcgaccgcgccgaattactgcccagcgacctgcgcatcacagcaattgctagagatcaggtcgacgtaaatacttttttggaaggcctaagacagcgaatgcatgcctacatgggctctgagtcgccttccgatgccgagtggcagcactactcacgacattttcaatatgtgggcgccgacttcgccaacgctgacagctattccagtatcagggcaactctagatgatacccgtatcagcttattttacttggctacaccacccagcatcttcgccctaatttgcaacaatctggccactaataattgcctcaccggcgactgccgaatcgtactcgaaaaacccattggcgaatgtctagcctcgtcaaaggaagtcaatgaaacgctggctcgctactttgacgaaggatctatttatcgcatagatcactacctgggaaaggagaccgttcagaacttactcgcgctgcgctttgcaaaccgatttattaatagtcagtgggatgccaactgtatcgaccatgttcaaatcaccgtcggcgaaatcgtcggtattgagggtcgctggtcttactatgaccgcgttggccagctccgcgacatggttcaaaaccaccttatgcagttactctgtctcgtcgctatggagccccccaatagcctagaagccgatagcatccgcgacgagaaagtcaaaatcgtcaaggccttgagacgcatcgactctgatcaggtctctgagcacgtgattaaagggcaatacagccagggttggtcttcaggtgcggccgtgcctgggtaccttgaggagcccggttgtgagcgccctgacagcgataccgagacgtttatcgcgatcaaagctcatgtagacaactggcgctgggctggcgttccattttacctgcgaacaggaaaacgcgttcctgaaaaattaactgaaatcatcattcagtacaaagaccttccccacaacatttttagcggcggcaccagcgcgaacaagttaatcattcggttacagcccagggaaggcatagagctaacaatggcatcgaaacgccagacgctgcgagaaaaactgtccttacagaaccataccttggatttagattttcgggaaaccaccggcatgaatcgaattcccgacgcctacgaacgattatttcttgatgcaattaatggcgatcagtcgctgtttgtaggtcgagaggagatcgaagaaagctggcgctggtgtgatgaactgattgacgcctgcaaccaaaagaacatagagaccaagccctatcacgctggatcttggggcccacccaaagccgagcttttaattgaaaaggatgggcgtagctggcatgtctga

SEQ ID NO: 462 - protein, 481 aa, uncultured bacterium 581; identical to SEQ ID NO: 228

SEQ ID NO: 463 - DNA, 1602 bp, Nonomuraea sp; identical to SEQ ID NO: 311
  CDS (1)..(1602)

SEQ ID NO: 464 - protein, 533 aa, Nonomuraea sp; identical to SEQ ID NO: 312

SEQ ID NO: 465 - DNA, 1476 bp, Listeria monocytogenes
  CDS (1)..(1476)
atgacagatgagttagaacaaaaagcactgattactatttttggcggtacgggagatttggcaaatcgcaaactttacccttcgctatatcatttgtacagtaagggatctcttggcgacaattttgctgttattggaacggctcgtcgtgaatggagtaacgatttcttccgtgataaagtaaaagagtctatcaaagacattgacggttccgaaaaagacgcggatgcatttgcttctcacttctactatcaatctcatgatgtgacaaataaagaatcttatgtaactttaaaagatttgtctgatgaattagatgcaaaatacgaattaggtggcaatcgcctcttctatcttgcaatggcgccgaatttctttggaactatcgcaagtcgcattaaatctgaaggatttgtagatacagatggctttcatcgtttaattatcgaaaaaccatttggtcacgatttagctagtgcagaagaattaaataattcgcttcgtcaagcatttaaagaagatgaaatttatcgtattgaccattatttaggaaaagaaatgatccaaaatatctcggttattcgttttgcaaattctatcattgaatcgctttggaataatcgttacatcgataacatccaagttactttaactgaggtgcttggggttgaagatcgtgggcgctattacgatgaaagtggcgcgcttcgagacatggttcaaaaccatattctccaaatcgtttctctacttgcgatggagccaccaattaacttaacgacacgcgagattcgtcatgaaaaagttcgcgcgcttcgttccttacgcgtttttgaaggtaaagaagttcaccaaaactttattcgtggtcagtacggtcctggtgaagtaggtggcaaagaactcaaaggctatcgtcaagaagataatgtggatcctcattccaatacggaaacgtttgttgcagccaaactagaaatcgataacttccgctgggctggcgttccattttatattcgcacgggtaaacgtcttgcgaagaaaacgacccaaattgcgattcagttcaaagatgtaccgctgaatttatttggtcaacaacaatcgcttggtggtaatgtgcttgttattcatatccaaccggacgaaggtattacacttcatttgaacgtcaaagaacctggtcaaggtatggttacaatgccagtcaacttaaattatattcattcctctccagacggcatgaacacacctgaggcttacgaaaaattgattctagactgtcttcgcggtgatgcgacttacttctctcactgggatgaagtatcactatcatggaactttattgaccatatagcagatgtttggacaaatacgaaagatcatttcccgaactacaaatccggttcgatggggcctaaagaagcagacgacctcattcaacgcgacggattccagtggttcccaatcgattaa

SEQ ID NO: 466 - protein, 491 aa, Listeria monocytogenes
MTDELEQKALITIFGGTGDLANRKLYPSLYHLYSKGSLGDNFAVIGTARREWSNDFFRDKVKESIKDIDGSEKDADAFASHFYYQSHDVTNKESYVTLKDLSDELDAKYELGGNRLFYLAMAPNFFGTIASRIKSEGFVDTDGFHRLIIEKPFGHDLASAEELNNSLRQAFKEDEIYRIDHYLGKEMIQNISVIRFANSIIESLWNNRYIDNIQVTLTEVLGVEDRGRYYDESGALRDMVQNHILQIVSLLAMEPPINLTTREIRHEKVRALRSLRVFEGKEVHQNFIRGQYGPGEVGGKELKGYRQEDNVDPHSNTETFVAAKLEIDNFRWAGVPFYIRTGKRLAKKTTQIAIQFKDVPLNLFGQQQSLGGNVLVIHIQPDEGITLHLNVKEPGQGMVTMPVNLNYIHSSPDGMNTPEAYEKLILDCLRGDATYFSHWDEVSLSWNFIDHIADVWTNTKDHFPNYKSGSMGPKEADDLIQRDGFQWFPID

SEQ ID NO: 467 - DNA, 1485 bp, Bacillus cereus; identical to SEQ ID NO: 299
  CDS (1)..(1485)

SEQ ID NO: 468 - protein, 494 aa, Bacillus cereus; identical to SEQ ID NO: 300

SEQ ID NO: 469 - DNA, 1410 bp, Mycobacterium paratuberculosis; identical to SEQ ID NO: 293
  CDS (1)..(1410)

SEQ ID NO: 470 - protein, 469 aa, Mycobacterium paratuberculosis; identical to SEQ ID NO: 294

SEQ ID NO: 471 - DNA, 2454 bp, Mycobacterium paratuberculosis
  CDS (1)..(2454)
atggctacccagaaaccgcagaccatctcctacccggctcccgaggcccggccgcgtcgtcaccacaccgacccgctcgaccctcatgtgatcgtcctgttcggcgccaccggggatttggcgaaacgcaagctgatccccggtttggcgtatctggaccagtccgagctggcacccgacatccagatcgtcgccacgtcgctggaggacctgagcaacgacgaattccgcgagctggccaagaacgcgatcgactcgttcggcacgcacaagctgacgcccgaccagtggcgcaacttcgccgacatcatcacctacatcccgcagagcgccggctccgacgcgctggccgccgcggtggccgaggccgaggccaagctggggccgaacgtgcggcggctgcattacctgtcggtgccgccgaaggcggcgcgcgcggtgatcaccatgctgcgcgacgccaaactggtcgagcggtcgcgggtggtgatggagaaaccgttcggcaccgatctggccagcgcggtggcgctcaacgacttcgtgcaccaaaccttcgaggaatcccagattttccgcatcgaccacttcctgggtaaggaggccgcccagaacattctggcgttccgcttcgccaacgggttgttcgagccgatctggaaccgcaacttcatcgaccacatccaaatcgacatccccgaggccctcggcctggatcagcgggcgagtttctacgaggagaccggcgcctacaaggacatggtggtcacccatctgtttcaggtgatggccttcgtggtgatggagccgccgacggcgctcgaaccgttcgccatcagcgaagaaaagaacaaggtgttccggtcgatgcttccggtcaagccctcgaacgtggttcgcggtcagtacatcggctatcgcgaggaagacggagtggcaaaggattccgacaccgagacattcatcgccctcaaggtcggcatcgacaactggcggtgggccggggtgcccgtctaccttcgcaccggtaagaggatggccgagggcatccggcatcatctcgatcgcgttcaaggaggcaccgcggaccatgttcccgcccgggtcgggggtgggcacgcaggggcccgaccacctgacgttcgatcttgcggacaattcgcgggtgtcgctgtcgttctacggcaagcggcccggccccggcatgaaactggacaagctgtccatgcaattctccacccaggagatcgaaaccgcggtggacgtgctggaggtctacgaacggctcatcctggacgcgatgcgcggcgaccacaccctgttcaccaccgccgaaggcatcgaatcactgtgggagcgttccgaagagctgctcaacgacccgccaccggccaagctgtaccagccggggacgtggggccccaacgcaattcaccagttgatcgcgcccaacgcgtggcggctgccgttcgagcgcgagtggcgcgatccccagaccctaccccggagtgggcagctgagaagtgctgcggttcagcccaattcggcgctgagataactgatggcctggcggaattccctgaggatttcgttgtcgggcaactcgaagccgtagtcggtgtacacccgctcggtgggcaggcgggtgacgctccagccggtggcctccaggtggtcgccggccgggcggcgctcgccgagccagaccagttcggccacgtcgatgtccagtccgtgctggcgccaggtgctgcgcatcgcccgggcgcgttcgtcggtgaacacccgcatgtcggtgatgttctcggtggccagcctgctgcccggcgcgctgagcgcggtgatgttgtccagcagccggtcctgggcgtgcggcggcaggtagggcagcagcccctcggcgatccaggcggtacgggcgctgctgtcaaagccgttgtcgcgcaacgctgttggccagtcatcgcgcaaatcgacggcgacggtgcggcgctcggcggtcggttgcgcgcccagccgggccagggtgtcggtcttgaaggagatgacctcgggctggtcgacctcgaacaccacggtgcccgccggccaggacaaccggtaggcccgcgcgtcgagcccggcggccaggatgacggcctggcgaatgccggcagcggtcgcggagcggaagaaatcgtcgaaaaaccgcgtccgcaccgtgatttgctcgcgccgctgctgcagcgtcatcggcatgtcgtcggtgtcgagcgggatctggccgtccagcatccggacgaagaagggatgcccgaccgcgcgcaccaacggttcggcgaaccggtcgtcgagcagcgggtccggaccgcgagaggccagcgcccgggaggccgcgaccatggtcgcggtcgcccccacgctggaggccagatcccagctgtcgccctcggtacgtgccgaaccggtcgatga

SEQ ID NO: 472 - protein, 817 aa, Mycobacterium paratuberculosis
MATQKPQTISYPAPEARPRRHHTDPLDPHVIVLFGATGDLAKRKLIPGLAYLDQSELAPDIQIVATSLEDLSNDEFRELAKNAIDSFGTHKLTPDQWRNFADIITYIPQSAGSDALAAAVAEAEAKLGPNVRRLHYLSVPPKAARAVITMLRDAKLVERSRVVMEKPFGTDLASAVALNDFVHQTFEESQIFRIDHFLGKEAAQNILAFRFANGLFEPIWNRNFIDHIQIDIPEALGLDQRASFYEETGAYKDMVVTHLFQVMAFVVMEPPTALEPFAISEEKNKVFRSMLPVKPSNVVRGQYIGYREEDGVAKDSDTETFIALKVGIDNWRWAGVPVYLRTGKRMAEGIRHHLDRVQGGTADHVPARVGGGHAGARPPDVRSCGQFAGVAVVLRQAARPRHETGQAVHAILHPGDRNRGGRAGGLRTAHPGRDARRPHPVHHRRRHRITVGAFRRAAQRPATGQAVPAGDVGPQRNSPVDRAQRVAAAVRARVARSPDPTPEWAAEKCCGSAQFGAEITDGLAEFPEDFVVGQLEAVVGVHPLGGQAGDAPAGGLQVVAGRAALAEPDQFGHVDVQSVLAPGAAHRPGAFVGEHPHVGDVLGGQPAARRAERGDVVQQPVLGVRRQVGQQPLGDPGGTGAAVKAVVAQRCWPVIAQIDGDGAALGGRLRAQPGQGVGLEGDDLGLVDLEHHGARRPGQPVGPRVEPGGQDDGLANAGSGRGAEEIVEKPRPHRDLLAPLLQRHRHVVGVERDLAVQHPDEEGMPDRAHQRFGEPVVEQRVRTARGQRPGGRDHGRGRPHAGGQIPAVALGTCRTGR

SEQ ID NO: 473 - DNA, 1545 bp, Mycobacterium paratuberculosis; identical to SEQ ID NO: 291
  CDS (1)..(1545)

SEQ ID NO: 474 - protein, 514 aa, Mycobacterium paratuberculosis; identical to SEQ ID NO: 292

SEQ ID NO: 475 - DNA, 1449 bp, Lactobacillus johnsonii; identical to SEQ ID NO: 297
  CDS (1)..(1449)

SEQ ID NO: 476 - protein, 482 aa, Lactobacillus johnsonii; identical to SEQ ID NO: 298

SEQ ID NO: 477 - DNA, 1539 bp, Ashbya gossypii; identical to SEQ ID NO: 301
  CDS (1)..(1539)

SEQ ID NO: 478 - protein, 512 aa, Ashbya gossypii; identical to SEQ ID NO: 302

SEQ ID NO: 479 - DNA, 1734 bp, Oryza sativa
  CDS (1)..(1734)
atggccggcaccggcttacgattccggcagggcgccatcttcttctcaggagctcatgctgctgctcatccaagaacaaggactcctcaccaccattgctcacctcagaggacgcacgatgcgagaggaaggtgccgcctcacggctaagtccgcaaatggacgcccacagatcagtgcctccttcagagatgtggcgatagatggggcacagtctgaagatggggcgccagagcagggaggatccaccgtcagcatcaccgtcgtcggcgcctccggcgatctcgccaagaagaagatctttcccgcgcttttcgccctgtactacgaggactgcctcccggagcattttacagtttttggttatgctcgtagcaagatgagcgatgaagagctcaggaacatgattagcttgactctgacatgccggattgatcagagggagaactgcagtgacaagatggaacagtttctgaagagatgcttttatcaatctgggcagtacaattcagaggaagggttttctgaactggacagaaagctaaaagaaaaggaggctggcaaggtaccaaacaggctcttttacctgtcgattccaccgaacatatttgtcgatgtggtgagatctgctagtcgcacagcatcatctcaagacggatggacaaggttcatagtggagaagccattcggccgcgattccgagtcgtcaggggagctcactcgaaacttgaagaagtacttggccgaggagcagatattcaggattgaccattatttggggaaggagctggttgagaacctctcggtgctccgtttctccaatctcgtcttcgagccactgtggtcgaggaactacatcaggaatgtgcagctcatattttctgaagatttcggcacggagggtcgaggcggctacttcgacaactacgggatcatcagggacataatgcagaaccacctgctgcagatcctggccctgttcgccatggagactccggtcagcctcgacgccgaggacatccgcaacgagaaggtgaaagtgctgaggtcgatgaggcagctgaggctggaggacgtggtggtgggtcagtacaaggggcacagcaagggcgggaagacgtacccggcgtacgtggacgacccgacggtgccgagcggcagcatcacgccgacgttcgccgccgccgccctcttcatcgacaacgcccgctgggacggcgtccccttcctcatgaaggccggcaaggccctgcacacgcgacgggcggagatcagggtgcagttccggcgggtgccggggaacctgtacgggcggcggagccggagcgtgggcggcggcgggacgacagcgacgagggagctggagaaggcgacgaacgagctggtgctgcgggtgcagcccgacgaggcgatctacctcaagatcaacagcaaggtgcccgggctggggatgaggctggacagcagcgacctcaacctgctctactccgagcgctaccccgccgagatccccgacgcctacgagcgcctgctgctcgacgccatcgagggcgagcgccgcctcttcatccgcagcgacgagctcgacgccgcctgggccatcttcacccccgtcctcgccgacctcgaggccaacaaggtggcacccgagctctacccgtacggcagccggggacccgtcggagcgcactacctcgccgccaaccacaacgtccgctggggtgacattagctag

SEQ ID NO: 480 - protein, 577 aa, Oryza sativa
MAGTGLRFRQGAIFFSGAHAAAHPRTRTPHHHCSPQRTHDARGRCRLTAKSANGRPQISASFRDVAIDGAQSEDGAPEQGGSTVSITVVGASGDLAKKKIFPALFALYYEDCLPEHFTVFGYARSKMSDEELRNMISLTLTCRIDQRENCSDKMEQFLKRCFYQSGQYNSEEGFSELDRKLKEKEAGKVPNRLFYLSIPPNIFVDVVRSASRTASSQDGWTRFIVEKPFGRDSESSGELTRNLKKYLAEEQIFRIDHYLGKELVENLSVLRFSNLVFEPLWSRNYIRNVQLIFSEDFGTEGRGGYFDNYGIIRDIMQNHLLQILALFAMETPVSLDAEDIRNEKVKVLRSMRQLRLEDVVVGQYKGHSKGGKTYPAYVDDPTVPSGSITPTFAAAALFIDNARWDGVPFLMKAGKALHTRRAEIRVQFRRVPGNLYGRRSRSVGGGGTTATRELEKATNELVLRVQPDEAIYLKINSKVPGLGMRLDSSDLNLLYSERYPAEIPDAYERLLLDAIEGERRLFIRSDELDAAWAIFTPVLADLEANKVAPELYPYGSRGPVGAHYLAANHNVRWGDIS

SEQ ID NO: 481 - DNA, 1467 bp, Gluconobacter oxydans
  CDS (1)..(1467)
atggaacatttccagcaggtcgagcctttcgactatgtcatcttcggtgccactggcgatctcacgatgcgcaagctgctgcccgcgctctacaaccgccttcggatgggccagattccggatgatgcgtgcatcatcggagccgcccgtacggagctggaccgggaggcctatgtcgcgcgggcccgagacgcccttgagcggtttcttccctcagacatcctgggcccggggctggtcgagcgtttcctcgcccgtctcgattacgtgacgctggacagcagccgcgagggcccgcagtgggacgccctgaagtccctgctggccaaggcacagcctgaccgggtgcgcgtctatatttcgcaaccgcaccgcagcttacggcagcatctgcgagacctgaaccgctacgagctgatcacccccacgtcgcgggttgttctcgaaaagccgatcggtacgaacatggccaccgccaccgccatcaatgacggggtcggccagtattttccggaaaagcagatctaccggatcgatcattatctcgggaaagagacggtccagaacgttctcgccctgcgttttgcaaacccgctcatgaacgctgcctggtccggcgagcatatcgagagcgtgcagatcacggcggtcgagaccgtgggcgtcgaaggtcgtgcggcctattacgacacgtctggcgcgcttcgcgacatgatccagaaccacctgctccaggtactgtgtctggttgcgatggaagcccccgattcccttgaggccgatgccgtccgcaacgccaaactggccgtcctgaacgccctgcgccccatcacggatgccacagccgccaccgagacggtgcgcgcgcagtacacggcaggcgtggtcgatggcgagaatgttccgggttatcttgaagagctcggcaagcccagcgcgacggaaacctatgccgcaatccgcgcctgggtggacacgccgcgctggaagaacgtgccgttctacatccgcacggccaagcggtccggcaagaaggtcagcgagatcgtcgtgacgttccgcccggctgcgaccaccatgttcggcgccaccccggccagcaacaggctggtcctgcgcatccagcccaacgaaggcgtggacctgcgtctgaacgtcaagaaccctgcgctggatgtcttcaacctgcggacggcggatcttgatacctccatccgcatggaaggcggcctgcccttcccggattcctatgagcggcttcttctggatgccgtgcggggtgatccggtactgttcatccgccgcgacgaggtcgaggccgcatggcgctgggtcgagcccatccttgaggcctggaaacatgacaaggcgcccatgcagacctacagtgcgggttcctatgggccggaacaggcaacacaactgctcgccagccatggcgacacctggcatgaagcgtcggagtaa

SEQ ID NO: 482 - protein, 488 aa, Gluconobacter oxydans; identical to SEQ ID NO: 306

SEQ ID NO: 483 - DNA, 1581 bp, Vibrio vulnificus; identical to SEQ ID NO: 113
  CDS (1)..(1581)

SEQ ID NO: 484 - protein, 526 aa, Vibrio vulnificus; identical to SEQ ID NO: 114

SEQ ID NO: 485 - DNA, 1476 bp, Photorhabdus luminescens; identical to SEQ ID NO: 115
  CDS (1)..(1476)

SEQ ID NO: 486 - protein, 491 aa, Photorhabdus luminescens; identical to SEQ ID NO: 116

SEQ ID NO: 487 - DNA, 1539 bp, Gloeobacter violaceus; identical to SEQ ID NO: 117
  CDS (1)..(1539)

SEQ ID NO: 488 - protein, 512 aa, Gloeobacter violaceus; identical to SEQ ID NO: 118

SEQ ID NO: 489 - DNA, 1539 bp, Gloeobacter violaceus; identical to SEQ ID NO: 119
  CDS (1)..(1539)

SEQ ID NO: 490 - protein, 512 aa, Gloeobacter violaceus; identical to SEQ ID NO: 120

SEQ ID NO: 491 - DNA, 1479 bp, Chromobacterium violaceum; identical to SEQ ID NO: 121
  CDS (1)..(1479)

SEQ ID NO: 492 - protein, 492 aa, Chromobacterium violaceum; identical to SEQ ID NO: 122

SEQ ID NO: 493 - DNA, 2229 bp, Giardia lamblia
  Giardia lamblia ATCC 50803
  CDS (1)..(2229)
atgttcaagccttcctgcgtcttcgtcatcatgggggcatcaggggatcttacttataagaagcttatccctgccatctacagccttgcctcggacggctaccttcacaaggacacttgcatccttggcgttgcacgctcagacattaagctggacgcctttcatagtcgtattaaggacggtatagataagtattcacgccatgggacaggccctgggtctgctacaaatcgagaaccctggagcacctttgtgaagagactcaactaccatcgcataaacaacatggaggcactgagtgactataaggcgctagcggagattgtactctgtaaggagccgtataaggaccttgagcgcgttgtcatttatcttgccctcccgcctggcgctttctatgccgcagtcaccaacttgggggagtcgggtctcaataacaggaagtgtacaatagtagtggagaagcccctcgggtcagatctccacacagccatggaactcgaaaagttgctccacagccagttcaaagaagaccagatagcccgcattgaccattatctggggaagatgcaagcactcaatatgatgggcttccgattctccaacgcgtttgttgagccaatctggaatgacaagtacatagatcgcatcatcatcactgcctctgaggagatagatgttaatgggcggatcagctactacgacgccaacggcatcattattgatatggttcaatcccaccttcttcagcttcttgcccttacgaccatggaagcccccatagacatgaccgcagatggcatacgcaacgaaaaggtgaagcttctgaagtccgttgaccccattcgtgtcgagaatgtcctgacagcccagtacgacgggtacctcaaacacgagggcgttccggagggctctcttgctccaacagctgtctgtcttagggtgtccatcaacaatgcacgctggaaaaggacgcagttcatcatccagacatgcaagtgtggggctacgcgcgagacccgaattgatgctgtcatgcgtccttcggggtcgcgcattctcaatactgttagcatggttccggatcctaacattttctcgttcctcgtgcaccccaccgaagggattcagatcagtttcgaaaccatggtgccatcaatatcttcttccactcttgcgtgcgacaacagtggatgcatcgaacgggagccgggtccgtttttgaccaagcccgtgacgctggactttgactaccagaagtcgcatatcatcacccaatcagcatatgagcgtctgctacaagaggcggttgcaggggatctatccaactttacacgtactgatgaggtagttgcccagtggaagatcgtagcaaacatattggataacagcaggaacaagcccatcatatacgctaagggccttcgtcttcttcatcccatctgcctcgacacttggaactacggaaaggagtacatacgtcgcttagcatacggccattgcaggttgcgtgttgcttgggaaatcactgccacggcaatactcgcgtgcgagaccgtcagtaataaggtcattcactccgtcgcactgtgggctgagacccacacgctgaataatagctttgacataattctcgccggtggcaccacccccaagcattgctatgaacacatgagccgccatctgatcaagcacttaccactggaggtgcggaagcgcatattcatctggctttcagatgagcgtgaggatacgtgtgccaggaacaacgggaaaatgatcaaggagtgctttaaggacagcggagttgttatcaatgaaatctatgatggaagcaagagctttgagaccagcatccgagagtactcaaagaaactcgaaggagtagaggtctttagggcagcaattctggggataggcacagatggccacatatgctcactcttcccaggttgtcttcccactctcaccagcagagaagatcagtgcatcatggttgaagtccctcagctgggagagcggcgagcaaccatcactcctctggtcatacaaagaattgcagacgttatcatccttgccactggagaagataagaccacagcattgactcgacttgcctacgcgcctttccagccggccttcattcctgcacagttggccactgcacagtctagcacaactgtggtctgtgatcacaccgcgcgttcatctaggccagtgttcaattaa

SEQ ID NO: 494 - protein, 742 aa, Giardia lamblia
  Giardia lamblia ATCC 50803
MFKPSCVFVIMGASGDLTYKKLIPAIYSLASDGYLHKDTCILGVARSDIKLDAFHSRIKDGIDKYSRHGTGPGSATNREPWSTFVKRLNYHRINNMEALSDYKALAEIVLCKEPYKDLERVVIYLALPPGAFYAAVTNLGESGLNNRKCTIVVEKPLGSDLHTAMELEKLLHSQFKEDQIARIDHYLGKMQALNMMGFRFSNAFVEPIWNDKYIDRIIITASEEIDVNGRISYYDANGIIIDMVQSHLLQLLALTTMEAPIDMTADGIRNEKVKLLKSVDPIRVENVLTAQYDGYLKHEGVPEGSLAPTAVCLRVSINNARWKRTQFIIQTCKCGATRETRIDAVMRPSGSRILNTVSMVPDPNIFSFLVHPTEGIQISFETMVPSISSSTLACDNSGCIEREPGPFLTKPVTLDFDYQKSHIITQSAYERLLQEAVAGDLSNFTRTDEVVAQWKIVANILDNSRNKPIIYAKGLRLLHPICLDTWNYGKEYIRRLAYGHCRLRVAWEITATAILACETVSNKVIHSVALWAETHTLNNSFDIILAGGTTPKHCYEHMSRHLIKHLPLEVRKRIFIWLSDEREDTCARNNGKMIKECFKDSGVVINEIYDGSKSFETSIREYSKKLEGVEVFRAAILGIGTDGHICSLFPGCLPTLTSREDQCIMVEVPQLGERRATITPLVIQRIADVIILATGEDKTTALTRLAYAPFQPAFIPAQLATAQSSTTVVCDHTARSSRPVFN

SEQ ID NO: 495 - DNA, 2850 bp, Plasmodium yoelii
  Plasmodium yoelii yoelii
  CDS (1)..(2850)
atggagtacgagacatttttaaaatgcttagatgaaataaggtgtgtgaacaatgtgaaatatatggagaccgaagatttaacagactttaataaaaaatcggcatattatatttgtaaagaaatatatgagaaacaattaagtaatgaaaatgggtatgtagttataggtttatcaggtggaaaaacacctatagatgtttataaaaatatgtgtgcaataaaagatataaaaattgataaaaataagttaattttttttataattgatgaaaggtataaaaatgatgatcataaattcagtaattataataatataaaatttttatttgatgaattaaatattaataaagaaacccaattatataagcccgatacaaaaaaagatcttgttagttgtataagagattataatgaacaaattaaaagcatgctagaaaaatataaaaaaatagatattgcaatattaggtatggggagtgatttccatatagctagtttatttccaaatgtgtattataatatatacatgaataattatcaaaataattatatatatgaagacaatgaaacaataaggtcattaaatgccgacaataatgttaatttaagtttactaaatgagcatgtatattttacaacaacaaataattttgatgtgagaaaaagaattacagtatcacttaacctattgtcaaattcaacaagtaaaatatttttattaaatacagcagataaattaaatttatggaaaaatatgctcttaaatttttatgttaatcctaactataatttatatccagcatttaaggtgatcgactctagaaatacaacagtcatagcatgtggtcataaaaattattcaaaaatgttagaagatttatatgttcaaaaagattgtgcactttctccggtcagcaataataatgtagagaataaaaatgagttactaacaatagttatatttggttgctctggtgatttagcaaaaaaaaaaatatacccagccttgtttaaattattttgtaataatttattaccaaaaaatataataataatcggttttgcaagaacagaacaagattttgaatcattttttaacaaaatatctatatatttaaaaatatctttaaacagttataaaaatttatcagtttttgaaaaagccgaacgcttaaattcttttaaaagcaaatgtagatattttattggaaactatttatctacggaaagttttgaaaattttgatgtatatataactcaggaagagaggatagcattaggctgttttggtcagaaaggtaatgaaaaacataaacaagttaattccacttcacaattccctaataatcatactaacacaaatgttaccaacaatatagataacggatgtgagccaccaatgcctaatgattctcccaaaagatgcccctacagttcaagttattccaatacatctggtaacgctacatgtcctcacagttcacaccattctgttaagcctagtaatactggatgcccatacctttcgagccaagctaatacatctgataattctggctgtccatacatttcacaccatattaataaatctggtaattcgggttgtccttatactatcactagaatgctttacttagccttaccaccccatatctttgtaagtacattacaaaattataaaaagtattgcttaaataaaaacagaatcaccaagatattacttgaaaagccatttggaaaagatttggaatcatttaaaatattatcgaaacaaatattagaagcttttcctgaaaaaaacatatatagaattgatcattatttaggaaaagatatggtttcaggattattaaaactaaaatttacaaatacatttttgttatctttaatgaacagacattttataaaatgcataaaaataacattaaaagaaacaaagggagtatatggaagaggacagtatttcgatccatatggaattataagagatgttatgcaaaatcacatgctacaattactgacattaataactatggaacatccaactgatttagatgataaatccatacaaaatgaaaaaataaaaatattaaaatctatagcttcaataaaattagaagacaccgttataggacaatatattaaatcaaataatgatgatacaaataataataattcaaatatttctgaaaatgccaatatagataaatctaaaataaatcatagttatcatgatgatccacatgtagatccaaattcaataacccctacattttgtacatgtgttttatatattaattcaataaattggcatggtgtcccaataatacttaaagcaggaaagggactaaataatgatatatgtgaaattaaaattcaatttcataatattatgggctcatctgacgaaagtatgtataataatgaatttgtaattattttacaacctgtagaaggaatatatctaaaacttatgataaaaaaaatgggttctgaagaaatggaagaagtacaattgaatttaagccttaatgaaaataataataaagcatatgttccagaagcttatgaaactttattatcagaatgctataaaggatataagagaaaatttatctcagatgaagaattatatgaatcttggagaatattcacccctctattaaatgagttacaagaaaagcatgtcaagcctctatcttacccatttgggtcatcagggccccaagaagcttatgaccttgtaagaaaatattacaattatggaaaaaactatgacacaactgctaaattttgcagaaaatcttcctactatgatgatagcttgtttgataatatgagagaataa

SEQ ID NO: 496 - protein, 949 aa, Plasmodium yoelii
  Plasmodium yoelii yoelii
MEYETFLKCLDEIRCVNNVKYMETEDLTDFNKKSAYYICKEIYEKQLSNENGYVVIGLSGGKTPIDVYKNMCAIKDIKIDKNKLIFFIIDERYKNDDHKFSNYNNIKFLFDELNINKETQLYKPDTKKDLVSCIRDYNEQIKSMLEKYKKIDIAILGMGSDFHIASLFPNVYYNIYMNNYQNNYIYEDNETIRSLNADNNVNLSLLNEHVYFTTTNNFDVRKRITVSLNLLSNSTSKIFLLNTADKLNLWKNMLLNFYVNPNYNLYPAFKVIDSRNTTVIACGHKNYSKMLEDLYVQKDCALSPVSNNNVENKNELLTIVIFGCSGDLAKKKIYPALFKLFCNNLLPKNIIIIGFARTEQDFESFFNKISIYLKISLNSYKNLSVFEKAERLNSFKSKCRYFIGNYLSTESFENFDVYITQEERIALGCFGQKGNEKHKQVNSTSQFPNNHTNTNVTNNIDNGCEPPMPNDSPKRCPYSSSYSNTSGNATCPHSSHHSVKPSNTGCPYLSSQANTSDNSGCPYISHHINKSGNSGCPYTITRMLYLALPPHIFVSTLQNYKKYCLNKNRITKILLEKPFGKDLESFKILSKQILEAFPEKNIYRIDHYLGKDMVSGLLKLKFTNTFLLSLMNRHFIKCIKITLKETKGVYGRGQYFDPYGIIRDVMQNHMLQLLTLITMEHPTDLDDKSIQNEKIKILKSIASIKLEDTVIGQYIKSNNDDTNNNNSNISENANIDKSKINHSYHDDPHVDPNSITPTFCTCVLYINSINWHGVPIILKAGKGLNNDICEIKIQFHNIMGSSDESMYNNEFVIILQPVEGIYLKLMIKKMGSEEMEEVQLNLSLNENNNKAYVPEAYETLLSECYKGYKRKFISDEELYESWRIFTPLLNELQEKHVKPLSYPFGSSGPQEAYDLVRKYYNYGKNYDTTAKFCRKSSYYDDSLFDNMRE

SEQ ID NO: 497 - DNA, 1476 bp, Neurospora crassa; identical to SEQ ID NO: 123
  CDS (1)..(1476)

SEQ ID NO: 498 - protein, 491 aa, Neurospora crassa; identical to SEQ ID NO: 124

SEQ ID NO: 499 - DNA, 1524 bp, Synechococcus sp; identical to SEQ ID NO: 125
  CDS (1)..(1524)

SEQ ID NO: 500 - protein, 507 aa, Synechococcus sp; identical to SEQ ID NO: 126

SEQ ID NO: 501 - DNA, 1455 bp, Rhodopirellula baltica; identical to SEQ ID NO: 127
  CDS (1)..(1455)

SEQ ID NO: 502 - protein, 484 aa, Rhodopirellula baltica; identical to SEQ ID NO: 128

SEQ ID NO: 503 - DNA, 1524 bp, Prochlorococcus marinus; identical to SEQ ID NO: 129
  Prochlorococcus marinus subsp
  CDS (1)..(1524)

SEQ ID NO: 504 - protein, 507 aa, Prochlorococcus marinus; identical to SEQ ID NO: 130
  Prochlorococcus marinus subsp

SEQ ID NO: 505 - DNA, 1524 bp, Prochlorococcus marinus; identical to SEQ ID NO: 131
  CDS (1)..(1524)

SEQ ID NO: 506 - protein, 507 aa, Prochlorococcus marinus; identical to SEQ ID NO: 132

SEQ ID NO: 507 - DNA, 1521 bp, Prochlorococcus marinus; identical to SEQ ID NO: 133
  CDS (1)..(1521)

SEQ ID NO: 508 - protein, 506 aa, Prochlorococcus marinus; identical to SEQ ID NO: 134

SEQ ID NO: 509 - DNA, 1488 bp, Haemophilus ducreyi; identical to SEQ ID NO: 135
  CDS (1)..(1488)

SEQ ID NO: 510 - protein, 495 aa, Haemophilus ducreyi; identical to SEQ ID NO: 136

SEQ ID NO: 511 - DNA, 1497 bp, Candidatus Blochmannia; identical to SEQ ID NO: 137
  Candidatus Blochmannia floridanus
  CDS (1)..(1497)

SEQ ID NO: 512 - protein, 498 aa, Candidatus Blochmannia; identical to SEQ ID NO: 138
  Candidatus Blochmannia floridanus

SEQ ID NO: 513 - DNA, 1768 bp, Oryza sativa
  CDS (2)..(1768)
catggcgctctcctgcatgaggtgctccccggccgccggcgccgtacgacgaggattggcatcggcggctccgccggcggcgctctcctttgccagatgcggcctccgtagagcggccgcgctcgggtggcgcgtcgccgccgtcgccactacgggagtgcaaggtgccaaggatgctggtctggagaaagctgccagaagtgcttcccaatcaaaggtggaaaatggctcaccttcagaaatcattttagatgattttgaagacttgagccctctatcagaaaatgatgactccactgttagtatcactgtagtcggagcatctggtgaccttgccaagaagaagatatttcctgcactttttgctctatactatgaagattgtcttccaaagcatttcactatcttcggatatgcacgcagcaagatgacagatgctgaattgagaaacatggtcagcaaaacactgacatgcagaatagataaaagggaaaactgtaatgagaagatggaagagtttttaaagagatgcttctatcattcaggccaatatgattcagaggagcatttcatggaccttgacaagaagctgaaacaacatgagggttccagagtttctaaccgtcttttctacttgtcaataccaccaaatatattccttgatgttgtaaaatgtgcaagcaaatcagcatcatctgggaatggttggacaagggtaattgttgagaaaccttttggtcgtgactcagattcatcttctgcattaacaaggggtctgaagcagtacctggtagaggaccaaatcttcaggattgaccactacttgggaaaggaactagtggagaacctgtctgtccttcgcttctcaaatcttgtttttgaacctctatggtcaaggcagtatataaggaatgtgcagctgatattctcagaggatttcggcactgaaggacgaggagggtactttgataggtatggtattatccgtgacataatgcagaatcatcttcttcagatactagccctatttgcaatggaaactcctgttagcttggaggcagaggacataagaaacgaaaaggttaaagttttgcgttccatgaagcccctgcaactggaagatgtggtgataggacagtacaaaagtcatacaaagggtggtaccacataccctggatacactgaagataagacggtgcccaaggatagtgtcaccccaacatttgctgcagctgcacttttcataaataatgctagatgggatggagttccttttcttatgaaagctgggaaggctttacatacaaaaggggctgagattagagtacagttccgacatgttcctggtaatctttataagaggagttttgggactgatcttgatacagccactaatgaacttgtcatacgtgtgcaacctgatgaagctatctacttgaagattaacaacaaaattcctggtcttggtatgagactagatagaagtaatttgaatcttcactatgcagcaaggtactccaaggagataccagatgcttatgagaggctcttacttgatgccattgaaggagagcgaaggctttttatccgttctgatgagttggatgccgcatgggagctcttcactcccttactcaaggagctggaagagaagcggatagcccctgagctatacccttatggaagccgcggtcctgtaggggctcactaccttgcagcaaagtacaacgtcagatggggtgatttgaccacagaacagaaggcatga

SEQ ID NO: 514 - protein, 588 aa, Oryza sativa
MALSCMRCSPAAGAVRRGLASAAPPAALSFARCGLRRAAALGWRVAAVATTGVQGAKDAGLEKAARSASQSKVENGSPSEIILDDFEDLSPLSENDDSTVSITVVGASGDLAKKKIFPALFALYYEDCLPKHFTIFGYARSKMTDAELRNMVSKTLTCRIDKRENCNEKMEEFLKRCFYHSGQYDSEEHFMDLDKKLKQHEGSRVSNRLFYLSIPPNIFLDVVKCASKSASSGNGWTRVIVEKPFGRDSDSSSALTRGLKQYLVEDQIFRIDHYLGKELVENLSVLRFSNLVFEPLWSRQYIRNVQLIFSEDFGTEGRGGYFDRYGIIRDIMQNHLLQILALFAMETPVSLEAEDIRNEKVKVLRSMKPLQLEDVVIGQYKSHTKGGTTYPGYTEDKTVPKDSVTPTFAAAALFINNARWDGVPFLMKAGKALHTKGAEIRVQFRHVPGNLYKRSFGTDLDTATNELVIRVQPDEAIYLKINNKIPGLGMRLDRSNLNLHYAARYSKEIPDAYERLLLDAIEGERRLFIRSDELDAAWELFTPLLKELEEKRIAPELYPYGSRGPVGAHYLAAKYNVRWGDLTTEQKA

SEQ ID NO: 515 - DNA, 1548 bp, Bos indicus; identical to SEQ ID NO: 139
  CDS (1)..(1548)

SEQ ID NO: 516 - protein, 515 aa, Bos indicus; identical to SEQ ID NO: 140

SEQ ID NO: 517 - DNA, 1536 bp, Chlamydophila caviae; identical to SEQ ID NO: 143
  CDS (1)..(1536)

SEQ ID NO: 518 - protein, 511 aa, Chlamydophila caviae; identical to SEQ ID NO: 144

SEQ ID NO: 519 - DNA, 1524 bp, Streptomyces avermitilis; identical to SEQ ID NO: 145
  CDS (1)..(1524)

SEQ ID NO: 520 - protein, 507 aa, Streptomyces avermitilis; identical to SEQ ID NO: 146

SEQ ID NO: 521 - DNA, 1647 bp, Streptomyces avermitilis; identical to SEQ ID NO: 147
  CDS (1)..(1647)

SEQ ID NO: 522 - protein, 548 aa, Streptomyces avermitilis; identical to SEQ ID NO: 148

SEQ ID NO: 523 - DNA, 1491 bp, Nitrosomonas europaea; identical to SEQ ID NO: 149
  CDS (1)..(1491)

SEQ ID NO: 524 - protein, 496 aa, Nitrosomonas europaea; identical to SEQ ID NO: 150

SEQ ID NO: 525 - DNA, 1524 bp, Enterococcus faecalis
  CDS (1)..(1524)
atgaatgaaaaagtagcattatttactattttcggggggacaggtgatcttgccaaacgtaaattgtatccttccctgttccgcttatataaaaaaggattattagctgagcgttttgcggtgattggtaccgcacgtcgggaatggacagacgaatactatcgtgaaatcgtccgtgaaaccattcaagacttaaatcccacggccgaagaggcaactgaattttctagtcatttctattaccaatcacataatgtgaatgatacggaacattataataccttaaaagaattatctgatcgcctaaatgaacaataccacttagaaggcaatcatgtttactatttagctatggcccctcaattctttggaaccattgttaatcacttgaaatcacaacatattatttcggaagaaggctttgatcgtctaattatcgaaaagccatttggttctgattatgaatctgcctacgaattaaatgaagaaattcgtgctgcatttcctgaacaagatattttccgaattgaccattacttaggcaaagaaatgatccaaaatatttcagccattcgttttgccaataatatttttgaatcacaatggaacaatcgttacattgataatgtccaaatcaccttcgctgaaagcttaggtgtcgaggatcgtggcggctattatgaccacagtggcgcactaaaagatatggttcaaaatcatattttacaagtcgttgcattgctttctatggagcctcctgttgccttttctgaaaaagaaattcggactgaaaaagtaaaagctttacgtgccatccgcctttattctgaagaagaagcccttcaaaatttcgtgcgtggacaatacggcgaaggtcagctagctgatcaaacatttgcagcctatcgtgatgaaccaaatgtggcagaaacttcatccactgaaacttttgttgctggtaaatttttaattgataatttccgttggtctggcgtccctttctatgttcgcacaggtaaacgattaactgaaaaaggcacacgcattaacatcgtctttaaacaagtacctattaatgtcttcaaagatgatacgtgtgaagaatgcgataaaaccgatttaccaccgaatgttttaactatctatatccaaccaactgaaggattttcattaaccttaaatggaaaagaaatcggtcaagggttcaatacaactccagtgaaacttgatttccgtcaaagtgctgaaatgactgaaaatagtccagaagcatacgaaaaacttctattagactgcctaaatggcgatagtacaaacttctctcattgggacgaagttgcccaatcttggcgcattgttgacattattcgacatgcttgggataaaacagacgtttctttccctaattatgccgctggcacaatgggcccgcaagctgccttcgacttattagaaaaagatggctttacttgggaatggcaaccagataactggtaccgtgaccgcggtcaacttgatcaataa

SEQ ID NO: 526 - protein, 507 aa, Enterococcus faecalis; identical to SEQ ID NO: 152

SEQ ID NO: 527 - DNA, 1464 bp, Tropheryma whipplei; identical to SEQ ID NO: 153
  CDS (1)..(1464)

SEQ ID NO: 528 - protein, 487 aa, Tropheryma whipplei; identical to SEQ ID NO: 154

SEQ ID NO: 529 - DNA, 2145 bp, Leishmania mexicana; identical to SEQ ID NO: 155
  CDS (298)..(1986)

SEQ ID NO: 530 - protein, 562 aa, Leishmania mexicana; identical to SEQ ID NO: 156

SEQ ID NO: 531 - DNA, 1494 bp, Dictyostelium discoideum; identical to SEQ ID NO: 157
  CDS (1)..(1494)

SEQ ID NO: 532 - protein, 497 aa, Dictyostelium discoideum; identical to SEQ ID NO: 158

SEQ ID NO: 533 - DNA, 1503 bp, Xylella fastidiosa; identical to SEQ ID NO: 159
  CDS (1)..(1503)

SEQ ID NO: 534 - protein, 500 aa, Xylella fastidiosa; identical to SEQ ID NO: 160

SEQ ID NO: 535 - DNA, 1506 bp, Vibrio parahaemolyticus; identical to SEQ ID NO: 161
  CDS (1)..(1506)

SEQ ID NO: 536 - protein, 501 aa, Vibrio parahaemolyticus; identical to SEQ ID NO: 162

SEQ ID NO: 537 - DNA, 1533 bp, Pseudomonas syringae; identical to SEQ ID NO: 163
  CDS (1)..(1533)

SEQ ID NO: 538 - protein, 510 aa, Pseudomonas syringae; identical to SEQ ID NO: 164

SEQ ID NO: 539 - DNA, 1470 bp, Pseudomonas syringae; identical to SEQ ID NO: 165
  CDS (1)..(1470)

SEQ ID NO: 540 - protein, 489 aa, Pseudomonas syringae; identical to SEQ ID NO: 166

SEQ ID NO: 541 - DNA, 1458 bp, Pseudomonas putida; identical to SEQ ID NO: 167
  CDS (1)..(1458)

SEQ ID NO: 542 - protein, 485 aa, Pseudomonas putida; identical to SEQ ID NO: 168

SEQ ID NO: 543 - DNA, 1506 bp, Pseudomonas putida; identical to SEQ ID NO: 169
  CDS (1)..(1506)

SEQ ID NO: 544 - protein, 501 aa, Pseudomonas putida; identical to SEQ ID NO: 170

SEQ ID NO: 545 - DNA, 1470 bp, Pseudomonas putida; identical to SEQ ID NO: 171
  CDS (1)..(1470)

SEQ ID NO: 546 - protein, 489 aa, Pseudomonas putida; identical to SEQ ID NO: 172

SEQ ID NO: 547 - DNA, 1485 bp, Lactobacillus plantarum; identical to SEQ ID NO: 173
  CDS (1)..(1485)

SEQ ID NO: 548 - protein, 494 aa, Lactobacillus plantarum; identical to SEQ ID NO: 174

SEQ ID NO: 549 - DNA, 1440 bp, Clostridium tetani; identical to SEQ ID NO: 175
  CDS (1)..(1440)

SEQ ID NO: 550 - protein, 479 aa, Clostridium tetani; identical to SEQ ID NO: 176

SEQ ID NO: 551 - DNA, 1512 bp, Bradyrhizobium japonicum; identical to SEQ ID NO: 177
  CDS (1)..(1512)

SEQ ID NO: 552 - protein, 503 aa, Bradyrhizobium japonicum; identical to SEQ ID NO: 178

SEQ ID NO: 553 - DNA, 1497 bp, Bacteroides thetaiotaomicron; identical to SEQ ID NO: 179
  CDS (1)..(1497)

SEQ ID NO: 554 - protein, 498 aa, Bacteroides thetaiotaomicron; identical to SEQ ID NO: 180

SEQ ID NO: 555 - DNA, 4583 bp, Mus musculus
  CDS (119)..(2488)
agagcttcatctggaagtgctggtccccagattggccatgaggggaccaaatgcagaccagggttgactgacaccaggttgtgttctttgcctgcactggcacacaggcatttggaagatgctcctagcggcaatgtgcttggcccttctgggctgcctacaggcgcaggaactcaagggtcatgtttccataatcctgctgggagcaaccggggacctagctaaaaagtacctgtggcagggactgtttcagctatacctggatgaggctgggaagggccacagtttcagcttccacggtgctgccctgacagccccccagcaaggccagaagctcatggacaaggccttggaatccctctcctgtcccaaggacttggtacccagtcgctgtgatgaactcaagggtcagtttctacagctgagccaataccaccagctgaagacagtggaggactatcagaccctcaacaaggatattgagacccaggtccagcaggatgggctctgggaggcaggcaggatcttctacttcagtgtgccgccctttgcctacgcagacattgcccgtaacatcaacagcagctgccgaccacacccaggtgcctggctacgggttgtttttgaaaaaccctttggccatgaccacctctcagcccagcagctggcttcagaacttggaagctttttccaggaggaggagatgtaccgtgtggatcattacctcggcaagcaggcggtggctcagatcctgcccttccgagatcagaaccgcaaggccttggatggcctctggaacaggcaccatgtggagcgggtggagatcattttgaaggagaccatagatgcggaaggtcgggccagtttctatgaggagtatggcgtcatccgtgacacgctgcagaaccacctgactgagatcctcacgctggtggccatggaactgcctctcaacatcagcagctcagccaccgtgctccagcataagctctgggccttccaggccctgcgggggctgcagaagagcagtgccatcctgggccagtaccaggcctacagcggacaggtgcgccgagagctgcagaagccagacggcttccagagcctgacaccaaccttcgcaggtgtccttgtccacatcgacaacctgcgttgggagggtgtccctttcatcctgatgtctggcaaggccttggatgagagagtgggctatgttcggattgtgtttaagaatcgggcgtactgcacccagagcgagagacactgggtgccggagcagagccggtgcctgccccagcagattatcttctacattggacacggtgagctgggccaccctgccattctggtcagccggaacctgttcaaaccctcactacccactcagaagtggaaggaggtgcaggaccagcctgggctccgcctgttcggccgtcctctgtctgattactacgcctacaggcctgtgcgggagcaagacgcctactccaccctcctgtcgcacatcttccactgccgaaaggagtccttcatcaccaccgagaacctcttggcctcctgggtcttctggaccccgttactggacagcctggcctttgaagttccacgcccgtacccagggggagccgagaatggccagctgctggacttcgagtttagcggtggtcagctgaccttctcccagcagcagctggaggtgctgataccagatctaggctcagtcccaaagcccagtgacttccaggtcctcggggcccggtatagacagagcccactgattaccgcctggccagaggagctgatctctaagctggccagtgacattgaagccgccgcggtgcaggcggtacggcacttcggcaagttccacctggcactgtcaggtggttcgagccccatagctctcttccagcagctggccacagggcattacagcttcccctgggcccacacacacctctggctggttgatgagcgctgtgtccctctctcagatccagactccaacttccagggcctgcaggctcacctgctacagcacgtcagggtaccctactacaacatccacccaatgccagtgcacctgcaccagcggctctgtgccgaggaggaccagggagctcagacctatgccagtgagatctcagccctggtggccaacagcagcttcgacctggtgctcctgggcatgggcaccgacgggcacacggcttctctgttcccacagtcccccacaggcctggatggtgatcagctggtggtgctgacggagagcccgttcaggccacaccaacgcatgagcctcagcctgcccctcatcaaccgagccaagaaggtagctgtcctggtcatgggcaggacaaaacgtgagatcacaacgttggtgagccgcgtgggccatgaacccaagaagtggcccatctcaggtgtggtgcctctttctgggcagctggtttggtacatggattacgaggcctttctgggatgacagtaccatcctggtcttagtcactctcagccttcctctttagctgcccactgtgcctcagctgtgtggagcctggtaccagagtcaggccccagagaagggaggacaaaactctgtgccgacttcctggacccactggttctcgggaatttcggtgcctgcacatggaaacaaggtagagctctggcctcaaaacccaggtaggagagggactaaggcctccagcagttacacaccagtagctacaacacacagtaagactgggcgaaggctccacgctaaagaaccaaagtggcctgccaagactggcctgcaatcttcaaactggtttctgtggaaagaggggccagtgttgatggggagcagggtgcagagactcctggtgaatgtcttgctctgagccaggccagcagagtagacacaatcctgagcctgcaccgggcgccttgcctcttctggtatcccatcatccctctgtgcacctagctgagatccagcgctcctccgggcagcttctgtctactctgggaggacacccactgtcctcagtattccccattacccctcagcctctccctctctacagacacagacactgccacgtcagaagttcccccagatctagagaccggggctccctttcccactaagaactgttatgctgtcattgggctgtcgggcatctctgatctaactagacgggagggctctgtctgctcctgggtcgggggtgactccagatcacagcctctttctagggcttatgtggccaattgccagcatcagggcagactgcagctagccctcctcacactacctctctctggcttcaagtctggcagcagcccctcctctgccgggcatctccaccattcttactgacgaacctggtaccactgggaacactacaggcagctcctaacttcagtcccctccagggccaacaacataaacatttcagggcacatacagttttcatttaggcctcctgctgagtcatgtgaacaagggaaggcccagaagggttaggatggcccgtcctcacagttacctatgtgtcagtcacagagtctccgtgtctttcagaattttcccatagagaggtttcctgtgatgaggagcgtcaggaaatctgtttctctccttttatttgattgtactttctcccagacagcacatggaaaagaattcttgctttcactagagatgtgtgcatagagtgtagcctgagctgagggctctgtatgaaaggcactcttgttgaaattctgcttactctgacctccagtgacccagactgacagaacacctctattccttggcagaaaagaggaacgccctggggtcctttcctggcctgctttgctcaggcttggatgcaggtagtcgcaggtgaagttccacctttagccatgtgggggagcccacgtgccaccactcacattccacccaggaggcgggttttagtgccaaacgtcttttcttcgcttttcttgctcactgcctctcaggcgtcttagcccagtgcgttttcatcagttcttagggactcggccttctgcagttgcaacatcagagagcaaggggccttgcatgcctcaggagagagggtgcccaggctctgtgtcaccattctgaataacggtgagtcactgcccagcctgagcctagaatgtcccgttcttatccagatgaatgactcgcctctgtctgtggggagtctctgcacaggggaggccagtgtgggggaaataccaaagatctcctttccggaagcaagcacaaataaaatttcattggaaaggttggtgggggacattgtctgtgttctctggcatgcacctgtgcgtgccctttccctttctgccccgggttaggaaggagtgatgttcagagccaggaccacggaagatgctgctcttcagactttctgaaccatcatccacagccagcagggctttaccaatcagtcacatctgtgtacgaatctgtctcaggaaggagctctcagccttaagacctgggataccctctattttttaaaaattttcattaaaaaattgttgcttgcaaaccacttaaaaaaaaaaaaaaa

SEQ ID NO: 556 - protein, 789 aa, Mus musculus
MLLAAMCLALLGCLQAQELKGHVSIILLGATGDLAKKYLWQGLFQLYLDEAGKGHSFSFHGAALTAPQQGQKLMDKALESLSCPKDLVPSRCDELKGQFLQLSQYHQLKTVEDYQTLNKDIETQVQQDGLWEAGRIFYFSVPPFAYADIARNINSSCRPHPGAWLRVVFEKPFGHDHLSAQQLASELGSFFQEEEMYRVDHYLGKQAVAQILPFRDQNRKALDGLWNRHHVERVEIILKETIDAEGRASFYEEYGVIRDTLQNHLTEILTLVAMELPLNISSSATVLQHKLWAFQALRGLQKSSAILGQYQAYSGQVRRELQKPDGFQSLTPTFAGVLVHIDNLRWEGVPFILMSGKALDERVGYVRIVFKNRAYCTQSERHWVPEQSRCLPQQIIFYIGHGELGHPAILVSRNLFKPSLPTQKWKEVQDQPGLRLFGRPLSDYYAYRPVREQDAYSTLLSHIFHCRKESFITTENLLASWVFWTPLLDSLAFEVPRPYPGGAENGQLLDFEFSGGQLTFSQQQLEVLIPDLGSVPKPSDFQVLGARYRQSPLITAWPEELISKLASDIEAAAVQAVRHFGKFHLALSGGSSPIALFQQLATGHYSFPWAHTHLWLVDERCVPLSDPDSNFQGLQAHLLQHVRVPYYNIHPMPVHLHQRLCAEEDQGAQTYASEISALVANSSFDLVLLGMGTDGHTASLFPQSPTGLDGDQLVVLTESPFRPHQRMSLSLPLINRAKKVAVLVMGRTKREITTLVSRVGHEPKKWPISGVVPLSGQLVWYMDYEAFLG

SEQ ID NO: 557 - DNA, 1485 bp, Staphylococcus epidermidis; identical to SEQ ID NO: 181
  CDS (1)..(1485)

SEQ ID NO: 558 - protein, 494 aa, Staphylococcus epidermidis; identical to SEQ ID NO: 182

SEQ ID NO: 559 - DNA, 1590 bp, Yersinia pestis; identical to SEQ ID NO: 183
  CDS (1)..(1590)

SEQ ID NO: 560 - protein, 529 aa, Yersinia pestis; identical to SEQ ID NO: 184

SEQ ID NO: 561 - DNA, 1530 bp, Synechococcus elongatus; identical to SEQ ID NO: 187
  CDS (1)..(1530)

SEQ ID NO: 562 - protein, 509 aa, Synechococcus elongatus; identical to SEQ ID NO: 188

SEQ ID NO: 563 - DNA, 1473 bp, Shewanella oneidensis; identical to SEQ ID NO: 189
  CDS (1)..(1473)

SEQ ID NO: 564 - protein, 490 aa, Shewanella oneidensis; identical to SEQ ID NO: 190

SEQ ID NO: 565 - DNA, 1476 bp, Oceanobacillus iheyensis; identical to SEQ ID NO: 191
  CDS (1)..(1476)

SEQ ID NO: 566 - protein, 491 aa, Oceanobacillus iheyensis; identical to SEQ ID NO: 192

SEQ ID NO: 567 - DNA, 1344 bp, Corynebacterium efficiens; identical to SEQ ID NO: 193
  CDS (1)..(1344)

SEQ ID NO: 568 - protein, 447 aa, Corynebacterium efficiens; identical to SEQ ID NO: 194

SEQ ID NO: 569 - DNA, 1545 bp, Corynebacterium efficiens; identical to SEQ ID NO: 195
  CDS (1)..(1545)

SEQ ID NO: 570 - protein, 514 aa, Corynebacterium efficiens; identical to SEQ ID NO: 196

SEQ ID NO: 571 - DNA, 1668 bp, Bifidobacterium longum; identical to SEQ ID NO: 197
  CDS (1)..(1668)

SEQ ID NO: 572 - protein, 555 aa, Bifidobacterium longum; identical to SEQ ID NO: 198

SEQ ID NO: 573 - DNA, 1284 bp, Rhodococcus opacus; identical to SEQ ID NO: 199
  CDS (1)..(1284)

SEQ ID NO: 574 - protein, 427 aa, Rhodococcus opacus; identical to SEQ ID NO: 200

SEQ ID NO: 575 - DNA, 2879 bp, Leishmania guyanensis; identical to SEQ ID NO: 203
  CDS (205)..(1893)
  Misc_Feature (1992)..(2321): n at positions 1992-2321 can be any nucleic acid
  Misc_Feature (2700)..(2840): n at positions 2700 and 2840 can be any nucleic acid

SEQ ID NO: 576 - protein, 562 aa, Leishmania guyanensis; identical to SEQ ID NO: 204

SEQ ID NO: 577 - DNA, 1689 bp, Leishmania mexicana
  CDS (1)..(1689)
  Misc_Feature (227)..(444): n at positions 227-444 can be any nucleic acid
  Misc_Feature (1475)..(1528): n at positions 1475-1528 can be any nucleic acid
atgtcggaagcgcaggctcgtgctgatgaggatgcttacatggccgacgtcgacagcattctggacgtgctccggacgcatgtgctggaacggaagccagatgacgttttccagttcctctccaagtcggcgctacgtctgcagaaggacagcggcgccgaattgtgcgatcgcatcaactgtaaggtaaaggatgaacagaagagccgtgcattgtctatcatcgnnnnnnnnnnnnnnnnnnnnnnnnnnnnnnnnnnnnnnnnnnnnnnnnnnnnnnnnnnnnnnnnnnnnnnnnnnnnnnnnnnnnnnnnnnnnnnnnnnnnnnnnnnnnnnnnnnnnnnnnnnnnnnnnnnnnnnnnnnnnnnnnnnnnnnnnnnnnnnnnnnnnnnnnnnnnnnnnnnnnnnnnnnnnnnnnnnnnnnnnnnnnnnnnnnnnnnnnnntacttttgtggagcgtacgacaaggtggacgacttcaagcgtcttgacgcggtgattcgagagaaggagaatgcctttaagggccctgagaagggtggaaaccgtctcttctatcytgctcttccgccctcagtgttcgcaattrtctgcgagcacattcacaagggggcgatgccgcaggaagtggggggatgggtgcgggtgatcatcgagaagccctttggcygcgataccaagagctccgccgagctttcccaagcgctggagccgttcttcgacgagtygcagctgtaccggattgacyactacctcgggaaggagatggtgcagaacatcatcacgacacgcttcgccaaccgtatcttcagcgctgtgtggaactcgagcaacattgcgtgcgtgcagatcacgttcaaggagaccatcggtaccgagggccgcggcggctacttcgacaacattggcattattcgcgatgtcatgcaaaatcacctcacccagattcttgccctgctggccatggagaagccgcggtcgctggacgctgagtgcatccgcgacgagaaggtgtcggtgctgaagtgcattgagccagtaactaaggagaattgtgttctgggccagtacactgcctccgccgatggctccatgcctggttacctacaggatgagaccgtaccccggggcagcacttgccccacatttgccgtgatgcggctcaacatcaacaacgaccgctgggccggcgtcccttttattctcaaggctggcaaggctgtggagcagaagtacgtggcgattcgcattcagttcaaggacgaggtccacccctacggcgatgcgacacagcgcaacgagctcgtcatccgcgctcagccgtccgaggccatgtatgtcaagatcaccacaaaagttcctggccttagtggggacttacggcagacgcaccagacagagctggaccttacctaccacacccggtacgatgtgcgccttccagacgcctacgagagcctcatcaacgacgcacnnnnnnnnnnnnnnnnnnnnnnnnnnnnnnnnnnnnnnnnnnnnnnnnnnnnnngcatcttcacaccgctcctgcaccagatcgacaatggagaaatccaaccgattccgtaccaggctggcacgcgcgggcccaaggaagcggatgaattcatcatcaacaacggcttcaagcaccagaaagactaccagtggactccctcgaacaagctgtga

SEQ ID NO: 578 - protein, 562 aa, Leishmania mexicana
  Misc_Feature (76)..(510): Xaa at positions 76-148, 187, 197, 224, 243, 250, 492-510 are any amino acid
MSEAQARADEDAYMADVDSILDVLRTHVLERKPDDVFQFLSKSALRLQKDSGAELCDRINCKVKDEQKSRALSIIXXXXXXXXXXXXXXXXXXXXXXXXXXXXXXXXXXXXXXXXXXXXXXXXXXXXXXXXXXXXXXXXXXXXXXXXXYFCGAYDKVDDFKRLDAVIREKENAFKGPEKGGNRLFYXALPPSVFAIXCEHIHKGAMPQEVGGWVRVIIEKPFGXDTKSSAELSQALEPFFDEXQLYRIDXYLGKEMVQNIITTRFANRIFSAVWNSSNIACVQITFKETIGTEGRGGYFDNIGIIRDVMQNHLTQILALLAMEKPRSLDAECIRDEKVSVLKCIEPVTKENCVLGQYTASADGSMPGYLQDETVPRGSTCPTFAVMRLNINNDRWAGVPFILKAGKAVEQKYVAIRIQFKDEVHPYGDATQRNELVIRAQPSEAMYVKITTKVPGLSGDLRQTHQTELDLTYHTRYDVRLPDAYESLINDAXXXXXXXXXXXXXXXXXXXIFTPLLHQIDNGEIQPIPYQAGTRGPKEADEFIINNGFKHQKDYQWTPSNKL

SEQ ID NO: 579 - DNA, 2916 bp, Leishmania amazonensis; identical to SEQ ID NO: 205
  CDS (207)..(1895)
  Misc_Feature (1577)..(1577): y at position 1577 is t or c
  Misc_Feature (2191)..(2311): n at positions 2191-2311 can be any nucleic acid

SEQ ID NO: 580 - protein, 562 aa, Leishmania amazonensis; identical to SEQ ID NO: 206
  Misc_Feature (463)..(481): Xaa at positions 463 and 481 are any amino acid

SEQ ID NO: 581 - DNA, 1440 bp, Chlorobium tepidum; identical to SEQ ID NO: 207
  CDS (1)..(1440)

SEQ ID NO: 582 - protein, 479 aa, Chlorobium tepidum; identical to SEQ ID NO: 208

SEQ ID NO: 583 - DNA, 2187 bp, Methylobacterium extorquens; identical to SEQ ID NO: 209
  CDS (640)..(2187)

SEQ ID NO: 584 - protein, 515 aa, Methylobacterium extorquens; identical to SEQ ID NO: 210

SEQ ID NO: 585 - DNA, 1476 bp, Bartonella henselae; identical to SEQ ID NO: 211
  CDS (1)..(1476)

SEQ ID NO: 586 - protein, 491 aa, Bartonella henselae; identical to SEQ ID NO: 212

SEQ ID NO: 587 - DNA, 2266 bp, Toxoplasma gondii; identical to SEQ ID NO: 213
  CDS (169)..(1851)

SEQ ID NO: 588 - protein, 560 aa, Toxoplasma gondii; identical to SEQ ID NO: 214

SEQ ID NO: 589 - DNA, 1923 bp, Xanthomonas campestris; identical to SEQ ID NO: 217
  CDS (1)..(1923)

SEQ ID NO: 590 - protein, 640 aa, Xanthomonas campestris; identical to SEQ ID NO: 218

SEQ ID NO: 591 - DNA, 1431 bp, Xanthomonas campestris; identical to SEQ ID NO: 219
  CDS (1)..(1431)

SEQ ID NO: 592 - protein, 476 aa, Xanthomonas campestris; identical to SEQ ID NO: 220

SEQ ID NO: 593 - DNA, 1839 bp, Xanthomonas axonopodis; identical to SEQ ID NO: 221
  CDS (1)..(1839)

SEQ ID NO: 594 - protein, 612 aa, Xanthomonas axonopodis; identical to SEQ ID NO: 222

SEQ ID NO: 595 - DNA, 1431 bp, Xanthomonas axonopodis; identical to SEQ ID NO: 223
  CDS (1)..(1431)

SEQ ID NO: 596 - protein, 476 aa, Xanthomonas axonopodis; identical to SEQ ID NO: 224

SEQ ID NO: 597 - DNA, 1458 bp, Thermoanaerobacter tengcongensis; identical to SEQ ID NO: 225
  CDS (1)..(1458)

SEQ ID NO: 598 - protein, 485 aa, Thermoanaerobacter tengcongensis; identical to SEQ ID NO: 226

SEQ ID NO: 599 - DNA, 1762 bp, Oryza sativa; identical to SEQ ID NO: 229
  CDS (41)..(1558)

SEQ ID NO: 600 - protein, 505 aa, Oryza sativa; identical to SEQ ID NO: 230

SEQ ID NO: 601 - DNA, 1305 bp, Encephalitozoon cuniculi; identical to SEQ ID NO: 231
  CDS (1)..(1305)

SEQ ID NO: 602 - protein, 434 aa, Encephalitozoon cuniculi; identical to SEQ ID NO: 232

SEQ ID NO: 603 - DNA, 2125 bp, Drosophila melanogaster; identical to SEQ ID NO: 233
  CDS (158)..(1738)

SEQ ID NO: 604 - protein, 526 aa, Drosophila melanogaster; identical to SEQ ID NO: 234

SEQ ID NO: 605 - DNA, 1470 bp, Ralstonia solanacearum; identical to SEQ ID NO: 235
  CDS (1)..(1470)

SEQ ID NO: 606 - protein, 489 aa, Ralstonia solanacearum; identical to SEQ ID NO: 236

SEQ ID NO: 607 - DNA, 1521 bp, Enterococcus mundtii; identical to SEQ ID NO: 237
  CDS (1)..(1521)

SEQ ID NO: 608 - protein, 506 aa, Enterococcus mundtii; identical to SEQ ID NO: 238

SEQ ID NO: 609 - DNA, 2230 bp, Homo sapiens
  CDS (54)..(1601)
cacttcggggctgcgagcgcggagggcgacgacgacgaagcgcagacagcgtcatggcagagcaggtggccctgagccggacccaggtgtgcgggatcctgcgggaagagcttttccagggcgatgccttccatcagtcggatacacacatattcatcatcatgggtgcatcgggtgacctggccaagaagaagatctaccccaccatctggtggctgttccgggatggccttctgcccgaaaacaccttcatcgtgggctatgcccgttcccgcctcacagtggctgacatccgcaaacagagtgagcccttcttcaaggccaccccagaggagaagctcaagctggaggacttctttgcccgcaactcctatgtggctggccagtacgatgatgcagcctcctaccagcgcctcaacagccacatgaatgccctccacctggggtcacaggccaaccgcctcttctacctggccttgcccccgaccgtctacgaggccgtcaccaagaacattcacgagtcctgcatgagccagataggctggaaccgcatcatcgtggagaagcccttcgggagggacctgcagagctctgaccggctgtccaaccacatctcctccctgttccgtgaggaccagatctaccgcatcgaccactacctgggcaaggagatggtgcagaacctcatggtgctgagatttgccaacaggatcttcggccccatctggaaccgggacaacatcgcctgcgttatcctcaccttcaaggagccctttggcactgagggtcgcgggggctatttcgatgaatttgggatcatccgggacgtgatgcagaaccacctactgcagatgctgtgtctggtggccatggagaagcccgcctccaccaactcagatgacgtccgtgatgagaaggtcaaggtgttgaaatgcatctcagaggtgcaggccaacaatgtggtcctgggccagtacgtggggaaccccgatggagagggcgaggccaccaaagggtacctggacgaccccacggtgccccgcgggtccaccaccgccacttttgcagccgtcgtcctctatgtggagaatgagaggtgggatggggtgcccttcatcctgcgctgcggcaaggccctgaacgagcgcaaggccgaggtgaggctgcagttccatgatgtggccggcgacatcttccaccagcagtgcaagcgcaacgagctggtgatccgcgtgcagcccaacgaggccgtgtacaccaagatgatgaccaagaagccgggcatgttcttcaaccccgaggagtcggagctggacctgacctacggcaacagatacaagaacgtgaagctccctgacgcctatgagcgcctcatcctggacgtcttctgcgggagccagatgcacttcgtgcgcagcgacgagctccgtgaggcctggcgtattttcaccccactgctgcaccagattgagctggagaagcccaagcccatcccctatatttatggcagccgaggccccacggaggcagacgagctgatgaagagagtgggtttccagtatgagggcacctacaagtgggtgaacccccacaagctctgagccctgggcacccacctccacccccgccacggccaccctccttcccgccgcccgaccccgagtcgggaggactccgggaccattgacctcagctgcacattcctggccccgggctctggccaccctggcccgcccctcgctgctgctactacccgagcccagctacattcctcagctgccaagcactcgagaccatcctggcccctccagaccctgcctgagcccaggagctgagtcacctcctccactcactccagcccaacagaaggaaggaggagggcgcccattcgtctgtcccagagcttattggccactgggtctcactcctgagtggggccagggtgggagggagggacgagggggaggaaaggggcgagcacccacgtgagagaatctgcctgtggccttgcccgccagcctcagtgccacttgacattccttgtcaccagcaacatctcgagccccctggatgtcccctgtcccaccaactctgcactccatggccaccccgtgccacccgtaggcagcctctctgctataagaaaagcagacgcagcagctgggacccctcccaacctcaatgccctgccattaaatccgcaaacagccaaaaaaaaaaaaaaaaaaaa

SEQ ID NO: 610 - protein, 515 aa, Homo sapiens [sequence omitted]

SEQ ID NO: 611 - DNA, 1470 bp, Rhizobium loti
  CDS (1)..(1470)
atgaccagccagatcattcccgtcgatcctttcgacttcatcattttcggcggcaccggcgacctgtcggaacgcaagcttctgccgtcgctctattatcgccagcgcgaccatcaattctccgagccgacgcgcatcatcggcacatcgcgctcgaaaatgagcgacgaggaattccgggccttcgccagccaggcgatctccgatcacgtcaagccggccgatatcgacgccaaggaattgaagaccttcctggcgcggctctcctatatctcggccgatgcgacgagcggcgctggcttcgacaagcttaagaaggcgatcggcgagagcgagagcatccgcgccttctatctggcggtggcgccggcgctgttcggcgatatctcgcacaagctgaaagagaacaagctgatcacgccgaactcgcgcatcgtgctggagaagccgatcggccgcgaccttgcctcggcgcgggcactcaacgatttggtcggcgacgacttccacgaaagccagattttccgcatcgaccactatctcggcaaggagacggtgcagaacctgatggcgctgcgctttgccaacgcgctctatgagccgctgtggaactccgcccatatcgaccacgtacagatcacggtggccgagaccgtcggcttggaagaccgcgtcacctactacgacaaggccggcgcgctgcgcgacatggtgcagaaccacatgctgcagttgctctgcctcgtggccatggaggcgccgtcgtcgatggacgccgacgccgtgcgcgacgagaagctcaaggtgctgcgggcgctgaagcgcatcaacggcaacgaggcgccgaagcacacggtgcgcggccagtatcgcgccggtgcatcggccggcgggccggtgaagggctatgtcgaggagctcggcaaggacagcaacaccgagaccttcgtcgccatcaaggccgagatcggcacctggcgctgggccggcgttccgttctacctcaggaccggcaagcgcttggcgacccgggtttcggaaatcgtcatcgagttcaagccgatcccgcattcgatcttcggcgacagcgccgggccgatcttcgccaaccagctggtcatccggctgcagccggacgagggcgtcaagcagttcatcatgatcaaggatccgggcccgggcggcatgcggctgcgccagatctcgctcgacatgagcttcgcgcaatccttcgacggccgcgcgcccgatgcctatgaacggctgatcatggacgtcatccgtggcaaccagacgctgttcatgcgccgtgacgaggtcgaggcggcgtggaaatggatcgacccgatccagaatgcctgggaaggcgccaagcaggaagcgcagggctatacggcaggcacatgggggccatctgcctcgatagcgctgatcgaacgtgacgggcggacatggcacgagagcaattga

SEQ ID NO: 612 - protein, 489 aa, Rhizobium loti
MTSQIIPVDPFDFIIFGGTGDLSERKLLPSLYYRQRDHQFSEPTRIIGTSRSKMSDEEFRAFASQAISDHVKPADIDAKELKTFLARLSYISADATSGAGFDKLKKAIGESESIRAFYLAVAPALFGDISHKLKENKLITPNSRIVLEKPIGRDLASARALNDLVGDDFHESQIFRIDHYLGKETVQNLMALRFANALYEPLWNSAHIDHVQITVAETVGLEDRVTYYDKAGALRDMVQNHMLQLLCLVAMEAPSSMDADAVRDEKLKVLRALKRINGNEAPKHTVRGQYRAGASAGGPVKGYVEELGKDSNTETFVAIKAEIGTWRWAGVPFYLRTGKRLATRVSEIVIEFKPIPHSIFGDSAGPIFANQLVIRLQPDEGVKQFIMIKDPGPGGMRLRQISLDMSFAQSFDGRAPDAYERLIMDVIRGNQTLFMRRDEVEAAWKWIDPIQNAWEGAKQEAQGYTAGTWGPSASIALIERDGRTWHESN

SEQ ID NO: 613 - DNA, 1428 bp, Rhizobium loti
  CDS (1)..(1428)
atgtcgaaaagccgaaggccggcaagtgacgccacagcgggagacgcacgcatgagccaggaacggtccgacacgctggtgctcttcggcgccaccggcgacctcgcccacaagaagatatttccggcgctttaccagatggtcgccaagggcacgctcaccgaaccggtgatcggcgtcgccttcgacgcctgggacatcaagcagttgcaggcccgcgcccgcgacggcatcgtcaacgcgctgggcaagatcgacgagaaggtgttcgccaaattcgcttcgttgctgcgctatgtcagcggcgactaccgcgatccggccaccttcgagaaactgaagaccgcgcttggcaccgcccagcggccgctgcactacatggcggtgccgccgaccatgttcgagactgtcgttcaagggttggagcagtcgggaaccgcgcgtggcgcacggctgatggtggaaaagccgttcggccatgatctgcagtcggcgcgctggctgaaccgggtgctgcatctggtgttcgacgaacagtcgatcttccgcatcgaccactatctcggcaaggaagcgatccagaacctgctttatttccgcttcgccaattccttcctcgagccgatctggaaccgcaatttcgtcgagagcgtgcagatcaccatggccgaggatttcggagtcgaggggcgcggccgcttctatgacgatgtcggctgcataagggatgtcatcgagaaccatctgctcaacatcctcctgctgctggccatggagccgccggtcggccgctccgccgacgacctgatcgacgagaaggtccaggtgctccgggcgatccggacgctgacgaaagacgatgtcgtgcgcggccagttcaccggctatctcgccgagcccggcgtggcgccgaattcgccggtcgaaaccttcgctgcggtgcggttcttcgtcgacacatggcgctggcaggacgtgccgttcttcattcgcgccggcaagaacatgccggtgcatgttacggaagtggtggtgcggctgaagcgcccgccgctcgacgtcttcgacccgatcaagcccgccgaccagaattacgtgcgcttccgcatcgacccgcaggtggtgatcgccataggcgcgcagcgcaaggcgcccggcgacgacatggtcggcgagcaggtggaactgacggcgctcgacgacagcaaggccgacatgccgccttacgagcgcctgatcggcgacgccatgaacggcaatggccagctcttcacccgccaggacgcggccgagctcgcctggcgcatcgtcgggccggtgcttggcgacaccacgccgccgcatctctacgagccgaaaacatggggaccggcgcacgccatggccggcttcgggccgcccaatggctggatcgacccggtggcatga

SEQ ID NO: 614 - protein, 475 aa, Rhizobium loti
MSKSRRPASDATAGDARMSQERSDTLVLFGATGDLAHKKIFPALYQMVAKGTLTEPVIGVAFDAWDIKQLQARARDGIVNALGKIDEKVFAKFASLLRYVSGDYRDPATFEKLKTALGTAQRPLHYMAVPPTMFETVVQGLEQSGTARGARLMVEKPFGHDLQSARWLNRVLHLVFDEQSIFRIDHYLGKEAIQNLLYFRFANSFLEPIWNRNFVESVQITMAEDFGVEGRGRFYDDVGCIRDVIENHLLNILLLLAMEPPVGRSADDLIDEKVQVLRAIRTLTKDDVVRGQFTGYLAEPGVAPNSPVETFAAVRFFVDTWRWQDVPFFIRAGKNMPVHVTEVVVRLKRPPLDVFDPIKPADQNYVRFRIDPQVVIAIGAQRKAPGDDMVGEQVELTALDDSKADMPPYERLIGDAMNGNGQLFTRQDAAELAWRIVGPVLGDTTPPHLYEPKTWGPAHAMAGFGPPNGWIDPVA

SEQ ID NO: 615 - DNA, 3584 bp, Plasmodium berghei
  CDS (370)..(3222)
ggaaaaactttaaaacttatatggcaggcaccaaaactaacaataaattgtattttttattcattaaaattaagggatatggaattgaaacacattataattccattaaataaaatgcaaatagttataaattcggataatataagggaaaggaaagaataaaaaaagtataattttatctatttaatagcaaaaattcaactgcttattaaatcatgctatttattttcaataaattgggggatagctaatacggaatgcacacatgcattatttatccatttcatctatttaataacgtatatatatattctatatattcattaatcccacctctgtatcaacatataaaataaagaatatataaatatggagtacgagacatctttaaaatgcttagatgaaataaggtgtgtgaacaatgtgaaatatatggaaaccgaagatttaacagactttaataaaaaatcggcatattatatttgtaaagaaatatatgagaaacaattaagtaatgaaaatgggtatgtagttataggtttatcaggtggaaaaacacctatagatgtttataaaaacatgtgtgcaataaaagatataaaaattgataaaaataagttaattttttttataattgatgaaaggtataaaaatgatgatcataaattcagtaattataataatataaaatttttatttgatgaattaaatattaataaagaaacccaattatataagcccgatacaaaaaaagatcttgttagttgcataagagattataatgaacaaattaaaagcatgatagaaaaatataaaaaaatagatattgtaatattaggtatggggagtgatttccatatagctagtttatttccaaatgtgtattataatatatacatgaataattatcaaaataattatatatatgaagacaatgaaacaataaggtcattaaatgccgacaataatgttaatttaagtttactaaatgagcaagtgtattttacaacaacaaataattttgatgtgagaaaaagaattacagtatcacttaacctattgtcaaattcaacaagtaaaatatttttattaaatacagcagataaattaaatttatggaaaaatatgctcttaaatttttatgttaatcctaactataatttatatccagcatttaaaatgatcgactctagcaatacaacggtcatagcatgtggccataaaaattattcaaaaatgttagaagatttatatgttcaaaaagatgaggcactttctccgatcagcaataataatgtagagaataaaaatgagttgctaacaatagttatatttggttgctctggtgatttagcaaaaaaaaaaatatatccagccttgtttaaattattttgtaataatttattaccaaaaaatataataataatcggttttgcaagaacaggacaagattttgaatccttttttaacaaaatagctatatatttaaaaatatctttaaacagttataaaaatttatcagtttttgaaaaagccgaacgcttaaattcttttaaaagcaaatgtagatattttattggaaactatttatctccggaaagttttgaaaattttgatgtatatataacccaggaagagaggatagcattaggctgttgtggtcagaaaggtaatgaaaaacacaaacaagtgaatgtcacatcacaattccctaataatcatactagcataaatattatcaacaatatagataacggatgtgaatctccaatgctcactgattctcccaaaagatacccctgcagttcaagttattccagtacatctggtaccgctgtatgcccttacagttcacaacatgatgttaagcctagtaataatggttgtccatacctttcaagccaagccaatacatctgatagttctggttgtccatacatttcataccatactaataaatctggtcatttgggttgtccttatactatcactagaatgctatacttagccttaccaccccatgtctttgtgagtacattacaaaattataaaaagtattgcttaaataaaaacagaatcaacaaaatattacttgaaaagccatttggaaaggatttggaatcatttaaaatattatcgaaacaaatattagaaacttttcctgaaaaaaacatatatagaattgatcattatttaggaaaagatatggtttcaggattattaaaactaaaatttacaaatatatttttgttatctttaatgaacagacattttataaaatgtataaaaataacattaaaagaaacaaagggagtatatggaagaggacagtatttcgatccatatggaattataagagatgttatgcaaaatcacatgctacaattactggcattaataactatggaacatccaacagatttaaatgataaatcgatacaaaatgagaaaataaaaatattaaaatctatagcttcaatcaaattagaagataccgttataggacaatatgttaaatcaaataatgatgatacaaataataatattaattcaaatatttctgaaaatgctagtatagataaatctaaaataaatcatagttatcatgatgatccacatgtagatccaaattcaataacccctacattttgtgcatgtgttttatatattaattcaataaattggcatggtgttccaataatacttaaagcaggaaagggactaaataatgatatatgtgaaattaaaattcaattccataatattatgggctcatctgacgaaagtatgtataataatgaatttgtaattattttacaacctgtagaaggaatatatctaaaacttatgataaaaaaaatgggttctgaagaaatggaagaagtgcaattgaatttaagccttaatgaaaataataataaagcatatgttccagaagcttatgaaactttattatcagaatgctataaaggatataaaaggaaatttatctcagatgaagaattatatgaatcttggagaatattcacccctttattaaatgagttacaagaaaagcatatcaagccgctatcttacccatttgggtcatcaggaccccaagaagcttatgacctcgtaagaaaatattacaattatggaaaaaactatgccacaactgctaaattttgcagaaaatcttcctactatgatgatagcttgtttgataatatgagagaataaaataattttcttttatattttttaattgtgcaatgtcattcattagctcaataaattggatacataaaacagtaattcttattgcaaaacgtggaatatctatcattcttatcgtttgatttcgacctctcaaaatagtaggaatggaatatattcaaaaaatttattatttttagcctatggctataaacagtggagaagaaatgccaaacttgccggcgtcatcactagtttatctatctggtccttgagggaggagaatcctatgcgtatattattatatatacttattaattggattcaatttatgaatcatatcatatttgcatggggtcatatttaatcttaatatatctaggtct

SEQ ID NO: 616 - protein, 950 aa, Plasmodium berghei
MEYETSLKCLDEIRCVNNVKYMETEDLTDFNKKSAYYICKEIYEKQLSNENGYVVIGLSGGKTPIDVYKNMCAIKDIKIDKNKLIFFIIDERYKNDDHKFSNYNNIKFLFDELNINKETQLYKPDTKKDLVSCIRDYNEQIKSMIEKYKKIDIVILGMGSDFHIASLFPNVYYNIYMNNYQNNYIYEDNETIRSLNADNNVNLSLLNEQVYFTTTNNFDVRKRITVSLNLLSNSTSKIFLLNTADKLNLWKNMLLNFYVNPNYNLYPAFKMIDSSNTTVIACGHKNYSKMLEDLYVQKDEALSPISNNNVENKNELLTIVIFGCSGDLAKKKIYPALFKLFCNNLLPKNIIIIGFARTGQDFESFFNKIAIYLKISLNSYKNLSVFEKAERLNSFKSKCRYFIGNYLSPESFENFDVYITQEERIALGCCGQKGNEKHKQVNVTSQFPNNHTSINIINNIDNGCESPMLTDSPKRYPCSSSYSSTSGTAVCPYSSQHDVKPSNNGCPYLSSQANTSDSSGCPYISYHTNKSGHLGCPYTITRMLYLALPPHVFVSTLQNYKKYCLNKNRINKILLEKPFGKDLESFKILSKQILETFPEKNIYRIDHYLGKDMVSGLLKLKFTNIFLLSLMNRHFIKCIKITLKETKGVYGRGQYFDPYGIIRDVMQNHMLQLLALITMEHPTDLNDKSIQNEKIKILKSIASIKLEDTVIGQYVKSNNDDTNNNINSNISENASIDKSKINHSYHDDPHVDPNSITPTFCACVLYINSINWHGVPIILKAGKGLNNDICEIKIQFHNIMGSSDESMYNNEFVIILQPVEGIYLKLMIKKMGSEEMEEVQLNLSLNENNNKAYVPEAYETLLSECYKGYKRKFISDEELYESWRIFTPLLNELQEKHIKPLSYPFGSSGPQEAYDLVRKYYNYGKNYATTAKFCRKSSYYDDSLFDNMRE

SEQ ID NO: 617 - DNA, 1491 bp, Pasteurella multocida; identical to SEQ ID NO: 241
  CDS (1)..(1491)

SEQ ID NO: 618 - protein, 496 aa, Pasteurella multocida; identical to SEQ ID NO: 242

SEQ ID NO: 619 - DNA, 1470 bp, Pseudomonas putida; identical to SEQ ID NO: 243
  CDS (1)..(1470)

SEQ ID NO: 620 - protein, 489 aa, Pseudomonas putida; identical to SEQ ID NO: 244

SEQ ID NO: 621 - DNA, 1566 bp, Trypanosoma brucei; identical to SEQ ID NO: 245
  CDS (1)..(1566)

SEQ ID NO: 622 - protein, 521 aa, Trypanosoma brucei; identical to SEQ ID NO: 246

SEQ ID NO: 623 - DNA, 1904 bp, Triticum aestivum; identical to SEQ ID NO: 247
  CDS (153)..(1682)

SEQ ID NO: 624 - protein, 509 aa, Triticum aestivum; identical to SEQ ID NO: 248

SEQ ID NO: 625 - DNA, 2098 bp, Solanum tuberosum; identical to SEQ ID NO: 251
  CDS (27)..(1775)

SEQ ID NO: 626 - protein, 582 aa, Solanum tuberosum; identical to SEQ ID NO: 252

SEQ ID NO: 627 - DNA, 1924 bp, Dunaliella bioculata; identical to SEQ ID NO: 253
  CDS (68)..(1840)

SEQ ID NO: 628 - protein, 590 aa, Dunaliella bioculata; identical to SEQ ID NO: 254

SEQ ID NO: 629 - DNA, 1976 bp, Cyanidium caldarium; identical to SEQ ID NO: 255
  CDS (46)..(1848)

SEQ ID NO: 630 - protein, 600 aa, Cyanidium caldarium; identical to SEQ ID NO: 256

SEQ ID NO: 631 - DNA, 2106 bp, Drosophila melanogaster
  CDS (28)..(1746)
gcgatttttgcctcagtctatacctccatgcaatatctatcactaatcttttttaaattacaactatttattcttggccaaaatttgacgttaccttgctttcttttattctctcaaaattatacttcaattaaattacccgaaatgatttccatggacccccacaatgaggaggcgtattccatcgtggtcttcggagcctcaggcggattggccaaaaagaaggtgtttccggcgctttgggctctcttccgggagaatcggctgccccagggcaccaaaatatttactttcacccggtccccgctgcagacgaagacgtaccggttgcagattcttccctatatggagctggacaagcatcgggaccccaagaagtacaacctcttttggacgaccgtgcactgtgtgcagggcgagtacgacaagccggagaactacgtggcactcacggaggcgatggtacaccaggagacaaagcacaatcaggtgcgcgcgaatcgaatcttctacctggcgctgccaccgatcgttttcgatcaggtgaccctcaatgtcagtcgaaaatgcagctcgaccacgggatggaaccgcataatagtggagaagcccttcgcgcgggacgacatctcctacaaggcctttcaaacctcgctgtgcaactgcttccgggagtcgcagatttacctgatggaccacctcctcagccggcaggtgatgcagaacttctttgcgctgcgctactcaaaccacttgtgggccgagaccctgaaccaccgccacgtggcggcggtgatgatatccataaagtgtgagctgccggtgtcggtgaatcgggcagactactttaatcagtttggcattattcgcgacctgatgaccaaccacatgatccagatgctggccatgctggctatggatcagccgtacgccaacactgctgacgacctgcgtgccgaacggctgaaggttcttcgccaggtgctaactcccaacataggcgacgtcgtcttggctcaataccgcaacaaccggcgggagactgaccccgcgaagtgcggctacacggagcacacctacatcccgaaggactcctttacgcccacattcgctctggtggtgctgcacatcaacaaccgccgttggaccggggtacccttcattctcagagcgggaaaagccttgaacgacaccaagtcggaggtgcgtatccagtacaagccggtggactgcgacaccttccacagcgacagtactgacattcgtaacgagctagtcctgagatccttccccacggaagaggtctttatgcgcatgcgcctcaagcggcagggcgaggatatctgccttcgggagagcgagatcaacctgcgagtggatgatcggggaccgaagggactccaaggactgcccggctacctgctcaacgtgtttcaaggcgaccagacgctcttcatgcgctccgatgagcagtgcgagatttggcgcatattctcccccgttctcgccaccatcgattcggatcgtccccgcccgttgcactatgactttggatcacggggtcctttgctggcctatcgcaaggccgagcgcgctggcttcgtattcttcgccacggacgagtggcatcagagcgaagagacgttagaatacacggtcaagaatagcaagcagctaatcggaccccataccgccctcaagccagtaagagatcctcggtccaagaggtcgaattccaatccttaggcgtagggagatagttaaagcttatacgaaagttttttaattaagcaagtgcagcctgctgtgttgcaccagttggccaccacttcaccttggctgcccagtctaacccttcaccgctgtccgttccattcggttctaatccgttccgtgccattgttgcccatgttgccggtgaggatttcgccaagaggggcgtaaacaacacgcaagtcttggccattgtcctttgcagataggggtgagatgcactatagtgtatgggaactacgtaattctctataaatttatatctacttatatttgtacatacaaaattgttttcagtttaataaaaattttatttaaattacatttaatttt

SEQ ID NO: 632 - protein, 572 aa, Drosophila melanogaster; identical to SEQ ID NO: 288

SEQ ID NO: 633 - DNA, 1777 bp, Mesembryanthemum crystallinum; identical to SEQ ID NO: 257
  CDS (39)..(1589)

SEQ ID NO: 634 - protein, 516 aa, Mesembryanthemum crystallinum; identical to SEQ ID NO: 258

SEQ ID NO: 635 - DNA, 1542 bp, Mus musculus
  CDS (1)..(1542)
atggcagagcaggtgaccctaagccggacccaagtgtgtgggatcctgagggaagagttgtaccaaaatgatgccttccaccaagctgatacacacatatttatcatcatgggtgcatcgggtgacctggccaagaagaagatctatcccaccatctggtggctgttccgggatggtcttctacccaaagaaaccttcattgtgggctatgcccgctcacaactcacagtggatgacatccaaaagcagagtgagcccttctttaaggccactccagaagaaagacccaagctggaggagttcttcacgcgtaactcctatgtagttggccagtatgatgatccagcctcctataagcacctcaacagctacattaatgccctgcaccaggggatgcaggccaaccatctattctacctggccttgccccccacagtctatgaagcagtcaccaagaacattcaagagacctgcatgagtcagacaggctttaaccgcatcatagtggagaaacccttcgggagagacctgcagagctccaatcaattgtctaaccacatctcctctcttttccgtgaagaccagatctaccgcattgaccactacctggacaaagagatggtccagaacctcatggtgctgaggtttgctaacaggatctttggccctatctggaatggagacaacattgtttgtgtgatcctcacatttaaagagccctttggtactgagggtcgtgggggctattttgatgaatttgggatcatcagggatgttatgcagagccacctcctgcagatgttgtgtctggtggccatggaaaagcctgctaccacagattcagatgatgtccgtaatgagaaggtcaaagtgttgaaatgtatctcagaggtggaaactgacaatgtgatccttggccagtatgtggggaaccccaatggagaaggagaagctgccaatggatacttagatgaccccacagtaccccgtgggtccacaactgccacctttgctgcagctgtcctctatgtgaagaatgaacggtgggatggggtacccttcatactgcgctgtggcaaagccctgaatgaacgcaaagctgaagtgagactgcaattccgagatataccaggcgacatcttccaccagaagtgcaagcgtaatgagctggtcatccgtatgcagcccaatgaggcagtatacaccacgatgatgaccaagaagcctggcatgttctttaaccctgaggagtcggagctggacctaacttatggcaacaaatacaagaatgtgaagctccctggtgcctatgaacgcctcatcctggatgtcttctgtgggtgccagatgcactttgtccgtactgatgaactcagggaaggctggcgtatcttcacaccactgctgcacaagattgaacgagaaaagccccagcccttcccctatgtatatggcagccgtggccccacagaggcagatgagctgatgaggagagtgggcttccagtacaagggtacctacaagggtactcacaagcactga

SEQ ID NO: 636 - protein, 513 aa, Mus musculus; identical to SEQ ID NO: 260

SEQ ID NO: 637 - DNA, 1485 bp, Actinobacillus actinomycetemcomitans; identical to SEQ ID NO: 261
  CDS (1)..(1485)

SEQ ID NO: 638 - protein, 494 aa, Actinobacillus actinomycetemcomitans; identical to SEQ ID NO: 262

SEQ ID NO: 639 - DNA, 1473 bp, Buchnera aphidicola; identical to SEQ ID NO: 263
  CDS (1)..(1473)

SEQ ID NO: 640 - protein, 490 aa, Buchnera aphidicola; identical to SEQ ID NO: 264

SEQ ID NO: 641 - DNA, 1473 bp, Buchnera aphidicola; identical to SEQ ID NO: 265
  CDS (1)..(1473)

SEQ ID NO: 642 - protein, 490 aa, Buchnera aphidicola; identical to SEQ ID NO: 266

SEQ ID NO: 643 - DNA, 2049 bp, Ceratitis capitata; identical to SEQ ID NO: 267
  CDS (60)..(1640)

SEQ ID NO: 644 - protein, 526 aa, Ceratitis capitata; identical to SEQ ID NO: 268

SEQ ID NO: 645 - DNA, 1524 bp, Chlamydia muridarum; identical to SEQ ID NO: 269
  CDS (1)..(1524)

SEQ ID NO: 646 - protein, 507 aa, Chlamydia muridarum; identical to SEQ ID NO: 270

SEQ ID NO: 647 - DNA, 2062 bp, Drosophila melanogaster
  CDS (303)..(1877)
aacgatcgtgcttatcttcattactactaccgcttccaccgaggcttcgcgactccgtacccgtactcgctttgttttacgtttgcgctactagttagtgaatccgacgacgacgacctgcgcgtgcgattaaagcgccgcaactctttgtaattacacagccagagccgcagaggttgctcaaaatccagcgactggagaaatcgtatatcgagttggaaatccgaatcgaaaggcttgcgtatacatagttgtcacacttttgcttttaaacagaaaaatccattcacattcgggtcaagatggcaacgcaaaaggaagatcacaccgccctggatctcataatcaagtcactcaagtcgcctacaatggtctgcgagggaacccactttgacggcaagattccgcacacgttcgtcatctttggggcgtcgggcgatctggccaagaagaagatctaccccacgctctggtggctctaccgcgatgacctgctgcccaagccgaccaagttctgcggctatgcccgttccatgctgaccgtcgatagcatcaaggagcagtgtctgccgtacatgaaggtccagccgcacgagcagaagaagtacgaggagttctgggccctcaatgagtacgtgtccggcagatatgacggacgcactggcttcgagctgcttaaccagcagctggagattatggagaacaagaacaaggccaaccgcatcttctatctggccctgccgcccagcgtcttcgaggaggtgactgtcaacatcaagcagatctgcatgtcggtctgcggttggaaccgcgtgatcatcgagaagcctttcggccgggatgacgcctcctcgcaggcgctgagcgaccatctggccggtctgttccaggaggatcagctgtaccgcatcgatcactacctgggcaaggagatggtgcagaacctgatgaccatacgcttcggcaacaagatcctcagctcgacgtggaaccgcgagaacatcgcctccgtgctgatcacgttcaaggagcccttcggcacgcagggtcgtggcggctacttcgacgagttcggcatcatacgcgacgtgatgcagaaccatctgctgcagatcctctcgctggtggccatggagaagccggtgagctgccacccggacgacattcgtgacgagaaggtcaaggtgctgaagagcatcgaggccctgacgctggatgacatggtgctgggccagtacctgggcaatccgcagggtacaaacgatgatgcgcgcacgggctacgtggaggaccccaccgttagcaacgattcgaacacgcccacctacgccctcggcgtgctcaagatcaacaacgagcgctggcagggagtgcccttcatcctgcgctgcggcaaggcgctgaacgagcgcaaggcggaggtgcgcatccagtaccaggacgtgctcggcgacatcttcgagggcaatacgaagcgcaacgagctggtcatacgcgtccagccgggcgaggccctgtactttaagatgatgaccaagagccccggcatcacgttcgacatcgaggagacggagctggacctcacctacgagcaccgctacaaggactcctacctgccggacgcgtacgagcgtctcatcctcgacgtcttctgcggctcccagatgcacttcgtccgctcggacgagctgcgcgaggcgtggcgcatcttcacgcccattctgcaccagatcgagaaggagcacattcgtccaatcacctaccagtacggatcgcgcggtcccaaggaggcggaccgcaagtgcgaggagaacaatttcaagtactccggctcctacaagtggcacggcggcaaggcggccacgtccaatcactgagcgtttggagcacaccaatccccgggctgggttcgcaggatactcctctttgtccgcacgtacatgtacatacatacatatatatgtatatatacatatatgcattctttggttatttgtaattcggtctgtacaagatttttttttattaaatatacaaaatagtgaaaaaaaaaaaaaaaaaa

SEQ ID NO: 648 - protein, 524 aa, Drosophila melanogaster
MATQKEDHTALDLIIKSLKSPTMVCEGTHFDGKIPHTFVIFGASGDLAKKKIYPTLWWLYRDDLLPKPTKFCGYARSMLTVDSIKEQCLPYMKVQPHEQKKYEEFWALNEYVSGRYDGRTGFELLNQQLEIMENKNKANRIFYLALPPSVFEEVTVNIKQICMSVCGWNRVIIEKPFGRDDASSQALSDHLAGLFQEDQLYRIDHYLGKEMVQNLMTIRFGNKILSSTWNRENIASVLITFKEPFGTQGRGGYFDEFGIIRDVMQNHLLQILSLVAMEKPVSCHPDDIRDEKVKVLKSIEALTLDDMVLGQYLGNPQGTNDDARTGYVEDPTVSNDSNTPTYALGVLKINNERWQGVPFILRCGKALNERKAEVRIQYQDVLGDIFEGNTKRNELVIRVQPGEALYFKMMTKSPGITFDIEETELDLTYEHRYKDSYLPDAYERLILDVFCGSQMHFVRSDELREAWRIFTPILHQIEKEHIRPITYQYGSRGPKEADRKCEENNFKYSGSYKWHGGKAATSNH

SEQ ID NO: 649 - DNA, 1536 bp, Emericella nidulans; identical to SEQ ID NO: 271
  CDS (1)..(1536)

SEQ ID NO: 650 - protein, 511 aa, Emericella nidulans; identical to SEQ ID NO: 272

SEQ ID NO: 651 - DNA, 1957 bp, Leuconostoc mesenteroides; identical to SEQ ID NO: 3
  CDS (206)..(1666)

SEQ ID NO: 652 - protein, 486 aa, Leuconostoc mesenteroides; identical to SEQ ID NO: 4

SEQ ID NO: 653 - DNA, 2055 bp, Macropus robustus
  CDS (94)..(1641)
attaacccgagcgcagcagcgggccctgtcgtctcccttcctctgccggatcagcaagtgacccaggatccggaggcgaagactgaaaacaacatggcagagcaggtggcactgagccggacccaagtgtgtggaattctccgggaagaattgtaccagggtgatgccttccaccagtcagacacacacatattcatcatcatgggagcctcgggtgacttagcaaagaagaaaatctaccctacaatctggtggctgttccgtgatgggcttctccccgaagacaccttcattgtgggctatgctcgctcaaacctcactgtggatgacatccgaaagcaaagcgagccctattttaaggccaccccggaagagaacctgaagctggaggagttcttctctcgaaattcctacgtggcaggccaatacgatgagccagcttcctttcagcgtctcaatgcccacatgaactccctgcatcatgggtcacaggccaaccgcctcttctacctggccttgccacccaccgtctatgaagctgtcactaagaacatcaaagagacttgcatgagccagataggttggaaccgggtcattgtggagaagccttttggaaaagatcttcagagctctgacaaactgtcaaaccacatttcctcactcttccatgaggaccagatctaccggatcgatcactacctgggcaaggaaatggtacagaacctcatggtgctaagatttggtaacaggatctttggaccgatctggaaccgagacaacattgcctgtgtcatcttcaccttcaaggagccctttggcactcttggccgagggggctattttgatgagtttgggatcattcgagacgtgatgcagaaccacctcttgcagatgctttgcctagtggccatggaaaaacctgcctccaccaactctgatgatgtccgggatgaaaaggtgaaggtcctgaagtgtatctcagaggtgagagcaactgatgtggtcttgggccagtatgtggggaacccagatggagaaggggaagccaccaaaggctatttggatgatcccacagtgccccggggctccaccactgccacctttgctgctgtggtcctctatgtggaaaatgaaagatgggacggagtcccctttatcctccgctgtggaaaggccctgaatgaacgcaaagcagaagtgaggttacagttccgggatgtggctggtgatatcttccagcgccagtgtaagcggaatgagctggtgatccgcgtgcagcccaacgaggctgtctacaccaagatgatgaccaagaagccagggatgttcttcaaccccgaagagtcagagctggacctgacctatggcaacagatacaaagatgtgaagctgcccgatgcttatgagcgccttatcctggatgtcttctgtggaagccagatgcactttgtgcgcagtgatgagcttcgggaagcctggaggatctttacgcccctgctgcaccacattgagaaggagaagacccagcccattgcctacgtctatggcagccgaggccctcctgaagcagacgaactgatgaagagagtgggcttccagtatgagggcacctacaagtgggtaaacccccacaagctctgaggcagcctggcagcccactagcttcctcccccttgtttcccatccccagcctccatgctcatccttttagccctttggcctcacttagggtctgtctctctgcccatcccctgttcatgttctactcaggcagaaactcttgggaccacaagaccaggagcccgtccctgggggagatggagggccccattgagagattccctgggccctttccactcccagaaggcccggggacccggccaccaacttctcagccctgtttacagctgcattaggtctgccattcagcagctaccagatacttcctcctgctttgagctcccagagccagctacattccaatagcagtcgctggaggtgtcctctgtttcccttcaggacagcagctttataaatacagagaattaccagtca

SEQ ID NO: 654 - protein, 515 aa, Macropus robustus; identical to SEQ ID NO: 274

SEQ ID NO: 655 - DNA, 1530 bp, Nostoc punctiforme; identical to SEQ ID NO: 275
  CDS (1)..(1530)

SEQ ID NO: 656 - protein, 509 aa, Nostoc punctiforme; identical to SEQ ID NO: 276

SEQ ID NO: 657 - DNA, 1476 bp, Rhizobium meliloti; identical to SEQ ID NO: 277
  CDS (1)..(1476)

SEQ ID NO: 658 - protein, 491 aa, Rhizobium meliloti; identical to SEQ ID NO: 278

SEQ ID NO: 659 - DNA, 2853 bp, Homo sapiens
  CDS (273)..(2648)
tgaggcctgaggcctggggcgggtggcggccgggctggccttggcctcgcgccttcccctgcggccgccgcgggctccgcgggcggtatcggagtgtcgtgcggcgcgtggccgcgtgacacgcgcacttgtcggagtgacgggccctgcggaagaggaggtgcggcccagggcgcaggggagccctcgggagcgggcccggccctcagcgccgccccggccgtgtcccggaggagcggcctgcgccgccgcgcgagaggaagcacccaggcatgtggaatatgctcatagtggcgatgtgcttggcccttctgggctgcctgcaagcccaggagctccagggacatgtctccataatcctgctgggagcaactggggacctggctaagaagtacttatggcagggactgttccagctgtacctggatgaagcggggaggggtcacagttttagcttccatggagctgctctgacagcccccaagcagggtcaagagctcatggccaaggccctggaatccctctcctgccccaaggacatggcacccagtcactgtgcagagcacaaggatcagttcctgcagctgagccagtaccgccaactgaagacggccgaggactatcaggccctgaacaaggacatcgaggcacagctccagcacgcaggcctccgggaggctggcaggatcttctacttctcagtgccacccttcgcctatgaagacattgcccgcaacatcaacagtagctgccggccaggcccgggcgcctggctgcgggttgtccttgagaaaccctttggccatgaccacttctcagcccagcagctggccacagaactcgggacctttttccaggaggaggagatgtaccgggtggaccattacttaggcaagcaggctgtggcgcagatcctgcctttccgagaccagaaccgcaaggctttggacggcctctggaaccggcaccatgtggagcgggtggagatcatcatgaaagagaccgtggatgctgaaggccgcaccagcttctatgaggagtacggtgtcattcgcgacgtcctccagaaccatctgacggaggtcctcaccctcgtggccatggagctgccccacaatgtcagcagtgcggaggctgtgctgcggcacaagcttcaggtcttccaggcgctgcggggcctgcagaggggcagtgccgtcgtgggccagtaccagtcttacagtgagcaggtgcgcagagagctgcagaagccagacagcttccacagcctgacgccgaccttcgcaggtgtcctagtgcacattgacaaccttcgctgggagggcgtgcctttcatcctgatgtctggcaaagccttggacgagagagtgggctacgctcggatcttgttcaagaaccaggcctgctgtgtgcagagcgaaaagcactgggccgcggcgcagagccagtgcctgccccggcagctcgtcttccacatcggccatggcgacctgggcagccctgccgtgctggtcagcaggaacctgttcaggccctccctgccctccagctggaaggaaatggagggaccacctgggctccgccttttcggcagccctctgtccgattactacgcctacagccctgtgcgggagcgggacgcccactccgtcctcttatcccatatcttccatggccggaagaatttcttcatcaccacagagaacttgctggcctcctggaacttctggacccctctgctggagagcctggcccataaggccccacgcctctaccctggaggagctgagaatggccgtctgttggactttgagttcagtagcggccggttgttcttttcccagcagcagccggagcagctggtgccagggccagggccggccccaatgcccagtgacttccaggtcctcagggccaagtaccgagagagcccgctggtctccgcctggtccgaggagctgatctctaagctggctaatgacatcgaggccaccgctgtgcgagccgtgcggcgctttggccagttccacctggcactgtcggggggctcgagccccgtggccctgttccagcagctggccacggcgcactatggcttcccctgggcccacacgcacctgtggctggttgacgagcgctgcgtcccactctcagacccggagtccaacttccagggcctgcaggcccacctgctgcagcacgtccggatcccctactacaacatccaccccatgcctgtgcacctgcagcagcggctctgcgccgaggaggaccagggcgcccagatctatgccagggagatctcagccctggtggccaacagcagcttcgacctggtgctgctgggcatgggtgccgacgggcacacagcctccctcttcccacagtcacccactggcctggatggcgagcagctggtcgtgctgaccacgagcccctcccagccacaccgccgcatgagccttagcctgcctctcatcaaccgcgccaagaaggtggcagtcctggtcatgggcaggatgaagcgtgagatcaccacgctggtgagccgggtgggccatgagcccaagaagtggcccatctcgggtgtcctgccgcactccggccagctggtgtggtacatggactacgacgccttcctgggatgagggcgcctgtgccccttgcccgcttcgctcctgtgctttccttcgcccgtgtcttccctcccttctcggccccgccacctgcccagcgtgccctggctctccagaaccttctatcccacagtcaggccccagagagggcaggacaagccttgtcccgatgcctttgaccggcagctctgtgtattggtggatagatgcagaaaca

SEQ ID NO: 660 - protein, 791 aa, Homo sapiens
MWNMLIVAMCLALLGCLQAQELQGHVSIILLGATGDLAKKYLWQGLFQLYLDEAGRGHSFSFHGAALTAPKQGQELMAKALESLSCPKDMAPSHCAEHKDQFLQLSQYRQLKTAEDYQALNKDIEAQLQHAGLREAGRIFYFSVPPFAYEDIARNINSSCRPGPGAWLRVVLEKPFGHDHFSAQQLATELGTFFQEEEMYRVDHYLGKQAVAQILPFRDQNRKALDGLWNRHHVERVEIIMKETVDAEGRTSFYEEYGVIRDVLQNHLTEVLTLVAMELPHNVSSAEAVLRHKLQVFQALRGLQRGSAVVGQYQSYSEQVRRELQKPDSFHSLTPTFAGVLVHIDNLRWEGVPFILMSGKALDERVGYARILFKNQACCVQSEKHWAAAQSQCLPRQLVFHIGHGDLGSPAVLVSRNLFRPSLPSSWKEMEGPPGLRLFGSPLSDYYAYSPVRERDAHSVLLSHIFHGRKNFFITTENLLASWNFWTPLLESLAHKAPRLYPGGAENGRLLDFEFSSGRLFFSQQQPEQLVPGPGPAPMPSDFQVLRAKYRESPLVSAWSEELISKLANDIEATAVRAVRRFGQFHLALSGGSSPVALFQQLATAHYGFPWAHTHLWLVDERCVPLSDPESNFQGLQAHLLQHVRIPYYNIHPMPVHLQQRLCAEEDQGAQIYAREISALVANSSFDLVLLGMGADGHTASLFPQSPTGLDGEQLVVLTTSPSQPHRRMSLSLPLINRAKKVAVLVMGRMKREITTLVSRVGHEPKKWPISGVLPHSGQLVWYMDYDAFLG

SEQ ID NO: 661 - DNA, 1970 bp, Arabidopsis thaliana
  CDS (60)..(1790)
aaaaaacaatggcatcatcatcatcatcacatttgttttgacgctccaagaaaatttgcatggcgacacattctatgatcattccttctccttcttcttcttcctcgtctctcgctactgctgcgtctccgtttaaagagactctaccactctttagtagatctctcacattcccgagaaaatccttgttttctcaggttcgcttgagattcttcgccgagaaacattctcagcttgatacttcaaatgggtgtgccactaatttcgcttctttacaagattctggagatcaacttacagaggaacatgttacaaaaggagagtctactcttagtattacagttgttggagcgtcaggggacttagccaagaagaagatatttcctgcattgtttgctctcttttatgagggttgtcttcctcaggacttttctgtttttggttatgctcggactaaactcactcatgaagagcttcgtgacatgattagtagtactttaacttgccggattgatcagagggaaaaatgtggggataagatggagcagttcttgaaaagatgcttttaccattcgggtcagtataactcggaagaggattttgcggaactaaacaagaagctcaaagagaaagaggcaggaaagatatcaaacaggctgtactatttgtcgatacccccaaacatattcgttgatgtggttaggtgtgcaagtcttagagcctcctcagagaatggctggacaagggtcattgtggaaaagccatttggtcgtgactctgaatcatccggagagttaactagatgtctgaaacagtatcttacagaggagcaaatcttcaggattgatcactatttgggaaaggagcttgttgagaacctttcagtgctccgattctcaaatcttgttttcgagcctctgtggtcaagaaattacatacgcaacgttcagctgattttttctgaggatttcggaacagaagggcgtggaggttactttgatcaatatggaatcatacgagacatcatgcaaaaccatctcttgcaaatacttgcactttttgcaatggagacgccagtgagcttagatgctgaggacataagaagtgaaaaggtgaaagttttgagatcaatgaaaccgttgcggcttgaagatgtggttgttggtcaatacaaaggccataacaagggaggaaaaacttatccaggttatacagacgatccaacggttccaaatcacagtctcactcctacatttgctgcagcagccatgttcatcaacaatgcgagatgggacggtgttccttttcttatgaaagctggaaaagctctccataccagaggagcagagatcagagttcagttcagacatgtcccaggaaacttgtacaagaaaagttttgctactaatttagacaatgcaacaaatgaactagtgattagagttcagcctgatgaagggatatacctgaggatcaacaacaaagttcctggtcttggaatgagactagatcgcagcgaccttaaccttctatatcgatccaggtatccaagagagataccagatgcatatgaaagactgcttctcgatgcaatcgaaggagagaggaggttgtttatcagaagtgatgagctagatgcagcatgggatctattcacaccggctttgaaggaactagaggagaagaaaatcattcctgagctctatccatatggaagcagaggtcctgttggtgcacattaccttgcatctaagtacaatgtgagatggggagatcttggagaagcttaagctttcgacagaaacaatatgatttggtgttaatatgagtaaactaacttgtcgatattatcaatgcgtagataaatccttgttaccaaaacttgctttttctctgacattttttgattgtttttggttctaaatcgagcatttcggaggaatgtaccaaaactcttgcaggaatagacc

SEQ ID NO: 662 - protein, 576 aa, Arabidopsis thaliana; identical to SEQ ID NO: 280

SEQ ID NO: 663 - DNA, 2112 bp, Arabidopsis thaliana; identical to SEQ ID NO: 281
  CDS (142)..(1932)

SEQ ID NO: 664 - protein, 596 aa, Arabidopsis thaliana; identical to SEQ ID NO: 282

SEQ ID NO: 665 - DNA, 2161 bp, Arabidopsis thaliana
  CDS (90)..(1967)
aaacttgcactcgtcttccactttgatccacttaaagcagctttaaagctttgaacatgtttagctataatccctgaggaactatcctcatgtctctctccagttgcttgcttcccttttctcaatcagcgacggctccgtcttcctccgtctgctcttgccatctcgccgcctctttttctaattttccggtttcgtcaagagactatagtttctccagaagtggaagccttgttctcaacggaggaggctcgaatctctgccggagattctgtggtttgaaactgtggatacttaagagcttgaatcgtagacaaggcaacaacagaaaacatcagcctgtaaacgagcttacaacacactcaaagcacactttcctcagcgatgatgaacgaggttttgctgaagaaactagagctgaagatttacgaccagaagagaatattctgggaacggatttgaatgatgggtttcacaatgttggagacttaccacctgtgtcaaaacaactctcggatgatctttcagatgttcgaagaagggcctcactttgcattgctgttgtaggagccactggtgagctagcaagagggaagattttcccggcattgtttgcgttgtattatagcggctaccttcctgaggatgttgctatatttggggtttcaagaaagaatctgacagatgaagacctcagatccatcattgcatcaacgctgacttgccgtgttgatcatcaggagaattgtgggggcaagatggatgcatttcagagtagaacatactatatcaatggaggttataataacagggatgggatgtcccgacttgccgagagaatgaaacagattgagggagaatcagaagcaaatagaatcttttacctctcagtacctcaagaagctctggtggatgtggcatgcaccattggagataacgctcaggcaccacgaggctggactcgaataatagttgagaaaccttttggttttaactcacattcgtctcatcagttaacaaagtcacttctctctaagtttgaagagaagcaaatctacaggatagatcacatgttaggaagaaacctcattgaaaatctgacagtgttaaggttttcaaatctagtttttgaaccactatggaacagaacatacatacgcaatatacaggttattatatcagaatcaattgcgcaaacagaaaagttttctgatggatatggaataatacgggacatagtgcacagccatatacttcagacaatcgcattacttgccatggaacctccgataagtctcgatggtgaagatatccgaaatgaaaaggtgaaggttttaagatcaattcgcaagatagacccgcgtgatgtcatccttggccagtataaatccagttcccgagacaagaacggtgtgatcttgaacggtgtagaccctacatattgtgcagcagccttgtatattgataatgcacgttgggatggtgtacctttccttgtaagagttggcactggcctcattaaacacagagtggagattcatgtgcaattccggcatgttcctggaaacctataccgagaaaatattggaataaacatagatttggggacaaatgagcttattctacgtgacgaacctgatgaggccatcctggtgaaaatcaacaacaaggttcctggtttaggtcttcagctagacgcttctgaacttaacttgctctataaagacaggtataaaaccgaagtaccagactcatatgaacacctaattcatgatgtaattgacggagacaatcatctgttcatgagaagcgatgaggttgcagcagcatggaacattcttagtccggttctagaagagatagacaagcatcacacagctccggagttgtatgaatttggtggacgaggaccagttgcggcatactatctttgggccaagcacggtgtcccatgggcagatgactgaagaagaaacatagatgcagcaacaaacaaatgagagtgattctgaatggttattgtgaagtgtgtttgtttagcttgaagctgtgccattccctgtagactgtacatatgtacacatgtatgtcatgttgctatatgaatgtccatcatggtggggtccataatagtgttgaaaagccaaaaaaaaaaaaaaaa

SEQ ID NO: 666 - protein, 625 aa, Arabidopsis thaliana; identical to SEQ ID NO: 284

SEQ ID NO: 667 - DNA, 1936 bp, Arabidopsis thaliana
  CDS (136)..(1686)
ctaatttatctatataaaaattcgaactatcaaactccaccccataacaaaattctccaaactagtgaaaattttgtcgccaccgtcgcaggtttgttctgtattttggttagagtgttaaaaaactattggaagatgggttctggtcaatggcatatggagaagaggtctactttaaagaatgattcgtttgtaaaagaatacaatccagtcacggaaactgggagtctctctatcattgttcttggtgcttctggtgatcttgctaagaagaagacttttcctgcacttttcaatctatttcatcagggatttcttaatccagatgaagttcatatatttggatatgcaaggagtaagattactgatgaggagcttagagataaaatccgcggatatcttgttgatgagaagaatgcatctaagaaaacagaagctttgtccaagtttctaaagctgattaagtatgtgagtggaccttatgattctgaggaagggtttaagagattagacaaggcgattttggagcacgagatatctaaaaagactgctgaaggatcttcgaggagattgttttatcttgcacttcctccgtctgtataccctcctgtaagcaagatgatcaaggcatggtgcactaacaaatctgatcttggtggatggactaggattgttgttgagaaaccatttggaaaggatttggaatctgcagagcagctgagttctcagattggagccttgtttgaagaaccacagatttatcgtattgatcactatctgggaaaagagttagttcaaaacatgttggttcttcggtttgccaatcgcttgtttttgccactatggaaccgcgacaatattgcaaacgtacagatcgttttcagagaagattttggaactgaaggtcgcggtggatattttgatgaatacggaatcattcgtgatattattcaaaaccacttgctccaggttctttgccttgtcgccatggagaaaccaatctctcttaaacccgagcacatccgggatgagaaagtgaaggttcttcaatctgtgattcccataaaagatgaagaggtggttcttggacaatatgaaggatatagagatgatccaactgttccaaatgactcaaacactccaacgtttgccacaacaattcttcgcattaacaatgaaagatgggaaggtgttccttttatactgaaggccggaaaggcaatgagttcaaagaaggcagatattcgcattcagtttaaagatgttcctggcgacatattcaaatgtcaaaaccaagggaggaacgagtttgttatacgcttgcagccttcagaggccatgtacatgaagctaactgtgaagcaaccgggtctggagatgcaaaccgtgcagagtgaactagacctatcgtacaagcagcgttaccaagatgtctcaattccagaggcttacgaacgccttattcttgacacaatcagaggcgaccaacaacactttgttcgcagagacgaattaaaggcagcttgggaaatcttcactccactgcttcacaggatcgacaagggagaagtgaaatcggtcccatacaaacaaggtagccgtggcccagcggaagcagatcagctacttaagaaagctggttatatgcagactcatggctacatttggatccctcctacattgtaaatggtataatcatagagatgatgatgatgagtacacacaaaataagagggttttttttcttttttttccttgcttgctgaataaaaactcttcaccagtttggagtttgtttaagtgaatcttatgtatactagtgatcttcactaggacattgtttgtttatgccttgtagtttttgttgtactagtcccttgttttctttttttacataatgcaaaacagctttgtggaaaagctaattaaattaaga

SEQ ID NO: 668 - protein, 516 aa, Arabidopsis thaliana
MGSGQWHMEKRSTLKNDSFVKEYNPVTETGSLSIIVLGASGDLAKKKTFPALFNLFHQGFLNPDEVHIFGYARSKITDEELRDKIRGYLVDEKNASKKTEALSKFLKLIKYVSGPYDSEEGFKRLDKAILEHEISKKTAEGSSRRLFYLALPPSVYPPVSKMIKAWCTNKSDLGGWTRIVVEKPFGKDLESAEQLSSQIGALFEEPQIYRIDHYLGKELVQNMLVLRFANRLFLPLWNRDNIANVQIVFREDFGTEGRGGYFDEYGIIRDIIQNHLLQVLCLVAMEKPISLKPEHIRDEKVKVLQSVIPIKDEEVVLGQYEGYRDDPTVPNDSNTPTFATTILRINNERWEGVPFILKAGKAMSSKKADIRIQFKDVPGDIFKCQNQGRNEFVIRLQPSEAMYMKLTVKQPGLEMQTVQSELDLSYKQRYQDVSIPEAYERLILDTIRGDQQHFVRRDELKAAWEIFTPLLHRIDKGEVKSVPYKQGSRGPAEADQLLKKAGYMQTHGYIWIPPTL

SEQ ID NO: 669 - DNA, 1959 bp, Arabidopsis thaliana
  CDS (194)..(1741)
aacaaaaatctgaaaaaaattgtcgacaaaaaaaagtgggagaaaatgacggaagctaaaaccacaccaaccccttcctcctccattttgtactagtagttgaagcttccttcttcttcttcttcttcacctaatacttcttctctatctctctcgccaaagaatcgtacttcttctctcaggttttaaggagatgggatctggtcaatggcacgttgagaaaaggtctacgtttaggaatgattcgtttgtgagagaatatggtatagttccagaaactggttgtctttcaatcatagttcttggtgcttctggtgatcttgctaagaagaagacttttcctgctctttttaacttataccgtcagggatttctcaatccagatgaagttcatattttcgggtatgcgaggactaagatttctgatgaagagctgagagataggattcgtggatatcttgttgatgagaagaatgctgagcaagctgaagctttgtcaaagtttctgcagctgattaagtatgtgagtggcccttatgatgctgaggaggggttccagagattagacaaggcaatttcagagcacgaaatctccaaaaatagtactgaagggtcttctagaagactgttttatcttgcacttccaccgtctgtttatccttctgtatgcaagatgatcaagacgtgctgcatgaacaaatctgatcttggtggatggacacggattgttgtggagaagccatttggcaaggaccttgaatctgcagagcaactgagttctcagattggagagttatttgatgaatcacagatctatcgtatagaccattatcttgggaaggaattagttcaaaacatgttggtcctccggtttgcaaatcgctttttcttgccactttggaaccgtgacaatatcgagaacgtgcagattgttttcagggaagattttggaactgaagggcgtggcggatattttgacgaatatggaataatccgtgatattattcaaaaccatctgctacaggttctttgccttgttgccatggagaaaccaatatctcttaaacctgagcatatccgggatgagaaagtgaaggtgcttcaatctgtggttccgataagcgatgacgaggtagttcttggacaatacgaaggatatagggatgatgatactgttccaaacgactcaaacactccaacatttgccacaacaatccttcgcatacacaacgaaagatgggaaggtgttccatttatattaaaggccggaaaagcgttgaattcaaggaaggcagaaattcgcattcaattcaaggatgtcccaggcgacatattcagatgtcaaaagcaaggaaggaacgagtttgtgatacgcttgcaaccttcagaggcaatgtacatgaaactaactgttaagcaaccaggtctagatatgaatactgtgcaaagtgaactagacttgtcgtatgggcaacggtatcaaggtgtcgctatccctgaggcatacgagcgcttaattcttgacacaatcaaaggcgatcaacaacatttcgttcgtagagacgaattaaaggttgcgtgggagatcttcacgccgctactccacaggatcgacaaaggagaagtaaagtcaatcccatacaaaccaggaagccgaggaccgaaagaagctgatcagctactagagaaagctggttatcttcagactcacggctatatctggatccctcctacactataaaaccctacatatatataaatacacaatacatgtatctacatgtatatgtataaattatgctgaatagtccctcctcgagtttggtgtttgtacgtgaaacttgctacttcagctgttcactttgacacttcctttggtcttgtatttgcggctttgtagaaataaaaataaaaatcttaccaataccataaatgaatttagcttttgttgtgctcgtt

SEQ ID NO: 670 - protein, 515 aa, Arabidopsis thaliana [sequence omitted]

SEQ ID NO: 671 - DNA, 1503 bp, Xenopus laevis; identical to SEQ ID NO: 289
  CDS (1)..(1503)

SEQ ID NO: 672 - protein, 500 aa, Xenopus laevis; identical to SEQ ID NO: 290

SEQ ID NO: 673 - DNA, 2004 bp, Arabidopsis thaliana
  CDS (51)..(1850)
gtttgcatccaaatccaattcataactcacactcgtctcaaattcgaaaaatgtcgtctctctcctgccctacctaccgctcccgcacttcgtcttcgtctcctttcttgtcgaatcatcatcattcttcgctgatcaatgttgttgacccacgccgctcactctccttccactacgcttctcctcaggggcttaatctagctgagctctgtgttgttagatcgcagaggaggtccgttcagagttctgttgtcgtgcaagatggatcagtagccaccgagtcaaactcgtccgaggaggcgaaagatgtaggggtgttaacgattccttcacttgaagctgacaaggttgtagcagagtctgatggcggtgaacaactttcaacagttagtatcacggtggtgggagcttctggtgatcttgccaagaagaaaatattcccagctcttttcgcactttactatgaaggctgtcttcctgagcattttaccatttttggctatgcaaggagtaagatgacagatgctgaacttagagttatggtcagcaaaacattgacatgtagaattgataagagggcaaactgcggtgaaaagatggaagagtttctcaagagatgtttttaccattcgggtcagtatgattctcaggaacattttgttgcattggacgagaagctcaaggagcatgagggtggaagactttcgaaccgtcttttctatctttcaatccctccaaatatctttgttgacgcggtgaaatgtgcaagctcatctgcttcatctgtcaatggatggactagggtcattgtcgagaaaccttttggccgggactccaaaacctcggctgcattaacaaagtctcttaagcagtacctggaggaagaccaaatatttaggatagaccattacttagggaaggagctggttgagaacttgtcggttcttcgattctcaaatcttatatttgaaccgctatggtcaaggcagtatataaggaacgtgcaattcattttttctgaggatttcggcactgaaggacgcggagggtacttcgacaattacggaataataagagatataatgcagaatcatctgcttcagatattagctcttttcgccatggaaacacctgtgagtttggatgcagaggatatcagaaatgaaaaggtaaaggtactacgttcaatgagaccaataaaacttgaagatgtggtgataggacagtacaagagccacagcataggaggagtcacttatccaagctatactgatgataaaactgtgccaaaaggtagtctgaccccgacatttgcagctgctgcactcttcatcgacaatgcaagatgggatggtgtaccttttctaatgaaagctgggaaagcactaaacacccgaagtgcggagataagagtccagttcaggcatgtgcctggaaatttatataaccggaattctggtactgatcgtgatcagaccacaaatgagcttgtcatccgcgtccaacctgatgaagctatctatttgaaaatcaacaacaaggtccctggtttaggaatgagattagatcagagtaacttaaatcttctctattcagcaaggtattcaaaggagattccagatgcatatgagaggcttttgttagatgcgatcgaaggtgaacgcagattgttcataagaagcgatgaacttgacgctgcttgggcgcttttcactccattgctcaaagagatagaagaaaagaagacaaccccagaattctatccttacggcagtcgtggtccagtcggtgcccattatctagccgcaaaacacaaggtccaatggggagacctaagtcttgatcagtgaaagagtggaagaacattttttgttcatagattcacgtcttagaattttcattatttgtgtggtttatggaaactttctttcgctttcagagataggagtgagttttgttcgattttgtatctggaataataagtaagaactaccctattcttgc

SEQ ID NO: 674 - protein, 599 aa, Arabidopsis thaliana
MSSLSCPTYRSRTSSSSPFLSNHHHSSLINVVDPRRSLSFHYASPQGLNLAELCVVRSQRRSVQSSVVVQDGSVATESNSSEEAKDVGVLTIPSLEADKVVAESDGGEQLSTVSITVVGASGDLAKKKIFPALFALYYEGCLPEHFTIFGYARSKMTDAELRVMVSKTLTCRIDKRANCGEKMEEFLKRCFYHSGQYDSQEHFVALDEKLKEHEGGRLSNRLFYLSIPPNIFVDAVKCASSSASSVNGWTRVIVEKPFGRDSKTSAALTKSLKQYLEEDQIFRIDHYLGKELVENLSVLRFSNLIFEPLWSRQYIRNVQFIFSEDFGTEGRGGYFDNYGIIRDIMQNHLLQILALFAMETPVSLDAEDIRNEKVKVLRSMRPIKLEDVVIGQYKSHSIGGVTYPSYTDDKTVPKGSLTPTFAAAALFIDNARWDGVPFLMKAGKALNTRSAEIRVQFRHVPGNLYNRNSGTDRDQTTNELVIRVQPDEAIYLKINNKVPGLGMRLDQSNLNLLYSARYSKEIPDAYERLLLDAIEGERRLFIRSDELDAAWALFTPLLKEIEEKKTTPEFYPYGSRGPVGAHYLAAKHKVQWGDLSLDQ

SEQ ID NO: 675 - DNA, 23 bp, Artificial sequence
  Primer
atgagtgaaggccccgtcaaatt

SEQ ID NO: 676 - DNA, 25 bp, Artificial sequence
  Primer
ctaattatccttcgtatcttctggc

SEQ ID NO: 677 - protein, 806 aa, Artificial sequence
  Consensus sequence
  Variant (2)..(3): Xaa in position 2 to 3 is any amino acid
  Variant (7)..(9): Xaa in position 7 to 9 is any amino acid
  Variant (11)..(12): Xaa in position 11 to 12 is any amino acid
  Variant (14)..(17): Xaa in position 14 to 17 is any amino acid
  Variant (19)..(23): Xaa in position 19 to 23 is any amino acid
  Variant (25)..(32): Xaa in position 25 to 32 is any amino acid
  Variant (34)..(35): Xaa in position 34 to 35 is any amino acid
  Variant (37)..(81): Xaa in position 37 to 81 is any amino acid
  Variant (83)..(95): Xaa in position 83 to 95 is any amino acid
  Variant (97)..(225): Xaa in position 97 to 225 is any amino acid
  Variant (227)..(230): Xaa in position 227 to 230 is any amino acid
  Variant (232)..(258): Xaa in position 232 to 258 is any amino acid
  Variant (260)..(262): Xaa in position 260 to 262 is any amino acid
  Variant (266)..(266): Xaa in position 266 is any amino acid
  Variant (268)..(268): Xaa in position 268 is any amino acid
  Variant (270)..(271): Xaa in position 270 to 271 is any amino acid
  Variant (273)..(275): Xaa in position 273 to 275 is any amino acid
  Variant (277)..(285): Xaa in position 277 to 285 is any amino acid
  Variant (287)..(290): Xaa in position 287 to 290 is any amino acid
  Variant (300)..(300): Xaa in position 300 is any amino acid
  Variant (302)..(302): Xaa in position 302 is any amino acid
  Variant (304)..(307): Xaa in position 304 to 307 is any amino acid
  Variant (310)..(310): Xaa in position 310 is any amino acid
  Variant (312)..(318): Xaa in position 312 to 318 is any amino acid
  Variant (321)..(323): Xaa in position 321 to 323 is any amino acid
  Variant (325)..(328): Xaa in position 325 to 328 is any amino acid
  Variant (330)..(332): Xaa in position 330 to 332 is any amino acid
  Variant (334)..(335): Xaa in position 334 to 335 is any amino acid
  Variant (337)..(339): Xaa in position 337 to 339 is any amino acid
  Variant (341)..(342): Xaa in position 341 to 342 is any amino acid
  Variant (344)..(347): Xaa in position 344 to 347 is any amino acid
  Variant (349)..(351): Xaa in position 349 to 351 is any amino acid
  Variant (354)..(355): Xaa in position 354 to 355 is any amino acid
  Variant (359)..(360): Xaa in position 359 to 360 is any amino acid
  Variant (362)..(366): Xaa in position 362 to 366 is any amino acid
  Variant (370)..(370): Xaa in position 370 is any amino acid
  Variant (372)..(382): Xaa in position 372 to 382 is any amino acid
  Variant (385)..(385): Xaa in position 385 is any amino acid
  Variant (387)..(387): Xaa in position 387 is any amino acid
  Variant (389)..(405): Xaa in position 389 to 405 is any amino acid
  Variant (409)..(438): Xaa in position 409 to 438 is any amino acid
  Variant (440)..(451): Xaa in position 440 to 451 is any amino acid
  Variant (453)..(455): Xaa in position 453 to 455 is any amino acid
  Variant (457)..(465): Xaa in position 457 to 465 is any amino acid
  Variant (467)..(467): Xaa in position 467 is any amino acid
  Variant (470)..(470): Xaa in position 470 is any amino acid
  Variant (475)..(478): Xaa in position 475 to 478 is any amino acid
  Variant (481)..(493): Xaa in position 481 to 493 is any amino acid
  Variant (495)..(524): Xaa in position 495 to 524 is any amino acid
  Variant (526)..(531): Xaa in position 526 to 531 is any amino acid
  Variant (534)..(534): Xaa in position 534 is any amino acid
  Variant (536)..(543): Xaa in position 536 to 543 is any amino acid
  Variant (545)..(545): Xaa in position 545 is any amino acid
  Variant (548)..(588): Xaa in position 548 to 588 is any amino acid
  Variant (592)..(592): Xaa in position 592 is any amino acid
  Variant (594)..(595): Xaa in position 594 to 595 is any amino acid
  Variant (597)..(599): Xaa in position 597 to 599 is any amino acid
  Variant (601)..(604): Xaa in position 601 to 604 is any amino acid
  Variant (606)..(609): Xaa in position 606 to 609 is any amino acid
  Variant (611)..(614): Xaa in position 611 to 614 is any amino acid
  Variant (616)..(797): Xaa in position 616 to 797 is any amino acid
  Variant (799)..(800): Xaa in position 799 to 800 is any amino acid
  Variant (802)..(805): Xaa in position 802 to 805 is any amino acid
GXXGDLXXXKXXPXXXXLXXXXXLXXXXXXXXGXXRXXXXXXXXXXXXXXXXXXXXXXXXXXXXXXXXXXXXXXXXXXXXXYXXXXXXXXXXXXXLXXXXXXXXXXXXXXXXXXXXXXXXXXXXXXXXXXXXXXXXXXXXXXXXXXXXXXXXXXXXXXXXXXXXXXXXXXXXXXXXXXXXXXXXXXXXXXXXXXXXXXXXXXXXXXXXXXXXXXXXXXXXXXXXXYXXXXPXXXXXXXXXXXXXXXXXXXXXXXXXXXRXXXEKPXGXDXXSXXXLXXXXXXXXXEXXXXRIDHYLGKEXVXNXXXXRFXNXXXXXXXWNXXXIXXXXIXXXEXXGXXXRXXYXXXXGXXXRDXXQNHXXQXXXXXAMEXPXXXXXXXXXXXEKXKXLXXXXXXXXXXXXXXXXXGQYXXXXXXXXXXXXXXXXXXXXXXXXXXXXXXYXXXXXXXXXXXXSXXXTXXXXXXXXXNXRWXGVPFXXXXGKXXXXXXXXXXXXXFXXXXXXXXXXXXXXXXXXXXXXXXXXXXXXNXXXXXXQPXEXXXXXXXXKXPGXXXXXXXXXXXXXXXXXXXXXXXXXXXXXXXXXXXXXXXXXAYEXLXXDXXXGXXXXFXXXXEXXXXWXXXXXXXXXXXXXXXXXXXXXXXXXXXXXXXXXXXXXXXXXXXXXXXXXXXXXXXXXXXXXXXXXXXXXXXXXXXXXXXXXXXXXXXXXXXXXXXXXXXXXXXXXXXXXXXXXXXXXXXXXXXXXXXXXXXXXXXXXXXXXXXXXXXXXXXXXXXXXXXXXXXXXXXXXXXXXXXXXXXXXXYXXGXXXXP

SEQ ID NO: 678 - protein, 150 aa, Artificial sequence
  Consensus sequence
  Variant (1)..(1): Xaa in position 1 is Arg or Lys
  Variant (2)..(2): Xaa in position 2 is Val, Ile, Leu or Ala
  Variant (3)..(3): Xaa in position 3 is Ile, Val, Met or Ala
  Variant (4)..(4): Xaa in position 4 is Ile, Val, Leu, Met or Ala
  Variant (8)..(8): Xaa in position 8 is Phe, Ile, Leu or Tyr
  Variant (9)..(9): Xaa in position 9 is Gly or Ala
  Variant (10)..(10): Xaa in position 10 is any amino acid
  Variant (11)..(11): Xaa in position 11 is Asp, Ser or Asn
  Variant (12)..(13): Xaa in position 12 to 13 is any amino acid
  Variant (14)..(14): Xaa in position 14 is Ser, Thr or Asn
  Variant (15)..(15): Xaa in position 15 is Ala, Ser, Phe or Tyr
  Variant (16)..(17): Xaa in position 16 to 17 is any amino acid
  Variant (18)..(18): Xaa in position 18 is Leu, Ile, Val or Phe
  Variant (19)..(21): Xaa in position 19 to 21 is any amino acid
  Variant (22)..(22): Xaa in position 22 is Leu, Ile or Val
  Variant (23)..(27): Xaa in position 23 to 27 is any amino acid
  Variant (28)..(28): Xaa in position 28 is Glu, Asp, Pro or Ser
  Variant (29)..(30): Xaa in position 29 to 30 is any amino acid
  Variant (31)..(31): Xaa in position 31 is Ile, Val, Leu, Thr or Met
  Variant (32)..(32): Xaa in position 32 is Tyr, Phe or Leu
  Variant (33)..(33): Xaa in position 33 is Arg, His or Leu
  Variant (34)..(34): Xaa in position 34 is Ile, Val, Met or Leu
  Variant (37)..(37): Xaa in position 37 is Tyr or Phe
  Variant (39)..(39): Xaa in position 39 is Gly, Ser or Ala
  Variant (40)..(40): Xaa in position 40 is Lys, Arg or Glu
  Variant (41)..(42): Xaa in position 41 to 42 is any amino acid
  Variant (43)..(43): Xaa in position 43 is Val, Ile, Leu, Ala or Met
  Variant (44)..(44): Xaa in position 44 is any amino acid
  Variant (45)..(45): Xaa in position 45 is Asn, Gly, Gln or Ala
  Variant (46)..(46): Xaa in position 46 is Leu, Ile, Met, Phe or Val
  Variant (47)..(49): Xaa in position 47 to 49 is any amino acid
  Variant (50)..(50): Xaa in position 50 is Arg, Lys or Glu
  Variant (51)..(51): Xaa in position 51 is Phe or Tyr
  Variant (52)..(52): Xaa in position 52 is any amino acid
  Variant (54)..(59): Xaa in position 54 to 59 is any amino acid
  Variant (60)..(60): Xaa in position 60 is any or no amino acid
  Variant (61)..(61): Xaa in position 61 is Trp, Met, Asn or Leu
  Variant (62)..(63): Xaa in position 62 to 63 is any amino acid
  Variant (64)..(65): Xaa in position 64 to 65 is any or no amino acid
  Variant (66)..(66): Xaa in position 66 is Ile, Val or Ala
  Variant (67)..(68): Xaa in position 67 to 68 is any amino acid
  Variant (69)..(69): Xaa in position 69 is Val, Ile, Met or Leu
  Variant (70)..(70): Xaa in position 70 is any amino acid
  Variant (71)..(71): Xaa in position 71 is Ile, Leu, Val, Phe or Ser
  Variant (72)..(74): Xaa in position 72 to 74 is any amino acid
  Variant (76)..(77): Xaa in position 76 to 77 is any amino acid
  Variant (78)..(78): Xaa in position 78 is Gly, Asp, Val or Ala
  Variant (79)..(81): Xaa in position 79 to 81 is any amino acid
  Variant (82)..(82): Xaa in position 82 is Arg or Lys
  Variant (83)..(84): Xaa in position 83 to 84 is any or no amino acid
  Variant (85)..(85): Xaa in position 85 is Tyr or Phe
  Variant (86)..(86): Xaa in position 86 is Tyr, Phe or Trp
  Variant (87)..(87): Xaa in position 87 is Asp, Glu, Ala or Asn
  Variant (88)..(89): Xaa in position 88 to 89 is any amino acid
  Variant (91)..(91): Xaa in position 91 is any amino acid
  Variant (92)..(92): Xaa in position 92 is any or no amino acid
  Variant (93)..(93): Xaa in position 93 is Leu, Ile, Val, Met or Ala
  Variant (94)..(94): Xaa in position 94 is Arg, Lys or Leu
  Variant (96)..(96): Xaa in position 96 is Met, Val, Ile or Leu
  Variant (97)..(97): Xaa in position 97 is Val, Met, Ile, Leu or Phe
  Variant (98)..(98): Xaa in position 98 is Gln, Pro or Thr
  Variant (99)..(99): Xaa in position 99 is Asn or Ser
  Variant (100)..(100): Xaa in position 100 is His, Gln or Pro
  Variant (101)..(102): Xaa in position 101 to 102 is any amino acid
  Variant (103)..(103): Xaa in position 103 is Gln, Glu, Asn or Leu
  Variant (104)..(104): Xaa in position 104 is Leu, Ile, Val, Met or Thr
  Variant (105)..(105): Xaa in position 105 is Leu, Met, Val, Ile, Phe or Tyr
  Variant (106)..(106): Xaa in position 106 is any amino acid
  Variant (107)..(107): Xaa in position 107 is Leu, Met, Ile, Val, Trp or Phe
  Variant (108)..(109): Xaa in position 108 to 109 is any amino acid
  Variant (111)..(111): Xaa in position 111 is Glu, Asp, Ser or Asn
  Variant (112)..(112): Xaa in position 112 is any amino acid
  Variant (114)..(118): Xaa in position 114 to 118 is any amino acid
  Variant (119)..(121): Xaa in position 119 to 121 is any or no amino acid
  Variant (122)..(122): Xaa in position 122 is Ile, Val, Leu, Phe or Met
  Variant (123)..(124): Xaa in position 123 to 124 is any amino acid
  Variant (125)..(125): Xaa in position 125 is Glu, Lys, Ala, Arg or His
  Variant (126)..(126): Xaa in position 126 is Lys or Val
  Variant (127)..(128): Xaa in position 127 to 128 is any amino acid
  Variant (129)..(129): Xaa in position 129 is Val, Ile, Ala, Leu or Phe
  Variant (130)..(130): Xaa in position 130 is Leu, Ile, Val, Phe or Met
  Variant (131)..(140): Xaa in position 131 to 140 is any amino acid
  Variant (141)..(145): Xaa in position 141 to 145 is any or no amino acid
  Variant (146)..(146): Xaa in position 146 is Val, Leu, Ile, Ala or Ser
  Variant (147)..(147): Xaa in position 147 is any amino acid
  Variant (148)..(148): Xaa in position 148 is Gly or Ala
  Variant (149)..(149): Xaa in position 149 is Gln or Arg
  Variant (150)..(150): Xaa in position 150 is Tyr or Phe
XXXXEKPXXXXXXXXXXXXXXXXXXXXXXXXXXXDHXLXXXXXXXXXXXXXXNXXXXXXXXXXXXXXXXXXXXXEXXXXXXXXXXXXXXGXXXXDXXXXXXXXXXXXXXMXXPXXXXXXXXXXXXXXXXXXXXXXXXXXXXXXXXXXXXX

SEQ ID NO: 679 - protein, 44 aa, Artificial sequence
  Consensus sequence
  Variant (1)..(1): Xaa in position 1 is Tyr or Leu
  Variant (2)..(2): Xaa in position 2 is any amino acid
  Variant (3)..(13): Xaa in position 3 to 13 is any or no amino acid
  Variant (15)..(17): Xaa in position 15 to 17 is any amino acid
  Variant (19)..(19): Xaa in position 19 is Phe or Tyr
  Variant (20)..(25): Xaa in position 20 to 25 is any amino acid
  Variant (26)..(26): Xaa in position 26 is Ile, Val, Leu or Phe
  Variant (27)..(29): Xaa in position 27 to 29 is any amino acid
  Variant (30)..(30): Xaa in position 30 is Arg, Asn, Phe or Gln
  Variant (31)..(31): Xaa in position 31 is Trp or Phe
  Variant (32)..(32): Xaa in position 32 is any amino acid
  Variant (33)..(33): Xaa in position 33 is Gly or Asp
  Variant (34)..(34): Xaa in position 34 is Val or Thr
  Variant (36)..(36): Xaa in position 36 is Phe or Ile
  Variant (37)..(37): Xaa in position 37 is any amino acid
  Variant (38)..(38): Xaa in position 38 is Leu, Met, Ile, Val or Phe
  Variant (39)..(40): Xaa in position 39 to 40 is any amino acid
  Variant (41)..(41): Xaa in position 41 is Gly or Ala
  Variant (43)..(43): Xaa in position 43 is any amino acid
  Variant (44)..(44): Xaa in position 44 is Leu, Met or Val
XXXXXXXXXXXXXSXXXTXXXXXXXXXXXXXXXXPXXXXXXKXX

SEQ ID NO: 680 - protein, 97 aa, Artificial sequence
  Consensus sequence
  Variant (1)..(1): Xaa in position 1 is Asn, Asp, Gln, Arg or Lys
  Variant (2)..(4): Xaa in position 2 to 4 is any amino acid
  Variant (5)..(5): Xaa in position 5 is Ile, Leu, Met, Phe or Val
  Variant (6)..(6): Xaa in position 6 is any amino acid
  Variant (7)..(7): Xaa in position 7 is Ile, Leu, Val, Ala or Ser
  Variant (8)..(8): Xaa in position 8 is any amino acid
  Variant (9)..(9): Xaa in position 9 is Pro or His
  Variant (10)..(12): Xaa in position 10 to 12 is any amino acid
  Variant (13)..(13): Xaa in position 13 is Ile, Val, Met, Leu, Phe or Ala
  Variant (14)..(19): Xaa in position 14 to 19 is any amino acid
  Variant (20)..(20): Xaa in position 20 is Lys, Ser or Arg
  Variant (21)..(29): Xaa in position 21 to 29 is any amino acid
  Variant (30)..(35): Xaa in position 30 to 35 is any or no amino acid
  Variant (36)..(36): Xaa in position 36 is Leu, Ile, Met or Val
  Variant (37)..(44): Xaa in position 37 to 44 is any amino acid
  Variant (45)..(64): Xaa in position 45 to 64 is any or no amino acid
  Variant (65)..(65): Xaa in position 65 is Ala, Gly, Pro or Ser
  Variant (66)..(66): Xaa in position 66 is Tyr or Leu
  Variant (67)..(68): Xaa in position 67 to 68 is any amino acid
  Variant (69)..(69): Xaa in position 69 is Leu, Met or Tyr
  Variant (70)..(70): Xaa in position 70 is Leu, Ile, Phe or Met
  Variant (71)..(71): Xaa in position 71 is any amino acid
  Variant (72)..(72): Xaa in position 72 is Asp, Glu, Ala, Asn or His
  Variant (73)..(75): Xaa in position 73 to 75 is any amino acid
  Variant (76)..(76): Xaa in position 76 is Gly, Ser or Asp
  Variant (77)..(80): Xaa in position 77 to 80 is any amino acid
  Variant (81)..(81): Xaa in position 81 is Phe or Tyr
  Variant (82)..(85): Xaa in position 82 to 85 is any amino acid
  Variant (86)..(86): Xaa in position 86 is any or no amino acid
  Variant (87)..(87): Xaa in position 87 is Val, Ile, Leu, Ala or Gln
  Variant (88)..(90): Xaa in position 88 to 90 is any amino acid
  Variant (92)..(96): Xaa in position 92 to 96 is any amino acid
  Variant (97)..(97): Xaa in position 97 is Ile, Val, Leu, Phe or Ala
XXXXXXXXXXXXXXXXXXXXXXXXXXXXXXXXXXXXXXXXXXXXXXXXXXXXXXXXXXXXXXXXXXXXXXXXXXXXXXXXXXXXXXXXXXWXXXXXX

SEQ ID NO: 681 - DNA, 1897 bp, Glycine max; identical to SEQ ID NO: 325
  CDS (133)..(1689)

SEQ ID NO: 682 - protein, 518 aa, Glycine max; identical to SEQ ID NO: 326

SEQ ID NO: 683 - DNA, 1782 bp, Brassica napus
  CDS (143)..(1693)
attttgcctccggtcgagatctcttgtcgttttctttgtctttctgatctttttcttttcctccgtttgttttgcgtgtttttgtgtttcgtggtagctgttgcacgtgtgagagtgtgacacgttcttgcttccgagaaagatggattctgggcagtggcacgttgagaagaggtccactttgaggaacgaatcgtttttaaaagagtacggtccagtctccgaaactggtagcctctccatcgtagttcttggtgcttctggtgatctcgccaagaagaagacttttcctgctcttttcaatctctaccaccaggggttccttaatccagatgaagttcatatctttggatatgcaaggagtaagatttctgatcaggagctgagagacaagatccatggatatcttgttgatgagaagaatgcttctgagaaagcggaagctttgtccaagtttctccagctgattaagtatgtgagtggtccttatgattctgaggacgggttcaaaaggctagaaaaggcaatctccgagcacgaaatctcgaaaaagacctctgaaggatcttcgaggagattgttttatcttgctctccctccctctgtataccctcctgtatgcaagatgatcaaggcatggtgcactaacacatctgatcttggtggatggacacgtgtcgtcgttgagaagccatttggaaaggacttggaatctgcagagcagcttagttcccagattggagcactgtttgatgagcctcagatttaccgtattgatcattacctgggaaaggaactagtccaaaacatgctggtccttaggtttgccaaccggttatttctgccgctatggaaccgtgacaacatagctaacgtccagattgttttcagggaagattttggaactgaaggccgtgggggatactttgatgaatacggaatcatccgtgatattattcaaaaccacttgctccaggttctttgccttgttgcaatggagaaaccagtctctcttaaacctgagcacatccgtgatgagaaagtgaaggttcttcaatcagtgatgcctataaaagatgaagaggtggttcttggacagtacgaaggttatagagatgatccaactgttccaaacgactcaaacactccaacctttgccacaacaattcttcgcatagacaatgaaagatgggaaggtgttccgtttatactgaaagccggaaaggcaatgagttcaaagaaggcagatattcggattcagtttaaggatgttcctggcgacatattcaaatgtcaaaagcaagggaggaacgagtttgtcatacgcttgcaaccttcggaggccatgtacatgaagctaactgtgaagcaaccgggtctagagatgcaaaccgtgcagagtgaactagacctatcttacaagcaacgttaccaagatgtcccgattccagaggcttacgagcgcctcattctcgacacaatcaaaggtgaccagcaacactttgttcgcagagatgagctgaaggcagcttgggaaatcttcactccactacttcacaggataggtaacggagaagtgaaatcgatcccatacaaaccaggaagccgagggccaacggaagcagatcagctgctagagaaaactggttatttgcagacccatggctacatatggatccctcctacgctgtaaacaaggagatgataatgagtgcactgcacatgaaataagagctcctctgtttttgttttcttgttttcttttccaaaaaaaaaaaaaaa

SEQ ID NO: 684 - protein, 516 aa, Brassica napus
MDSGQWHVEKRSTLRNESFLKEYGPVSETGSLSIVVLGASGDLAKKKTFPALFNLYHQGFLNPDEVHIFGYARSKISDQELRDKIHGYLVDEKNASEKAEALSKFLQLIKYVSGPYDSEDGFKRLEKAISEHEISKKTSEGSSRRLFYLALPPSVYPPVCKMIKAWCTNTSDLGGWTRVVVEKPFGKDLESAEQLSSQIGALFDEPQIYRIDHYLGKELVQNMLVLRFANRLFLPLWNRDNIANVQIVFREDFGTEGRGGYFDEYGIIRDIIQNHLLQVLCLVAMEKPVSLKPEHIRDEKVKVLQSVMPIKDEEVVLGQYEGYRDDPTVPNDSNTPTFATTILRIDNERWEGVPFILKAGKAMSSKKADIRIQFKDVPGDIFKCQKQGRNEFVIRLQPSEAMYMKLTVKQPGLEMQTVQSELDLSYKQRYQDVPIPEAYERLILDTIKGDQQHFVRRDELKAAWEIFTPLLHRIGNGEVKSIPYKPGSRGPTEADQLLEKTGYLQTHGYIWIPPTL

SEQ ID NO: 685 - DNA, 2034 bp, Brassica napus
  CDS (85)..(1797)
atcatgacagcctcacaaatgataagcagaggcaatcaaaatcacatatgaattttttgaagaaaattaatctaatatctctccatggcgacgcatactatgatcgttcgttcctcatcctctgctctcgctgcttcgtctccattaacagagactctaccactcttcactactagatctctcacattcccgagaaaatcctccttctctcgtcttcgcttgagattctttgccgaaaaactttctcagctcgactcctctaatcgctgtgcctctttacaagactctggagaacatcttacagaggagcatgacacaaaagaagagtcatccactcttagtattacagtggttggagcctctggagatttggccaataagaaaatattccctgcattgtttgctctcttttacgagggttgtcttcctcaggacttctctgtttttggttatgctcggaccaaactcacccatgaggagcttcgtgtcatgatcagtagaactttaacttgtcggatagaccaaagggagaactgtgtggacaaaatggatcagttcttaaagagatgcttttaccattcgggtcagtataactctgaagatgattttgcagaactaaacaccaagctcaaagagaaagaggaaggaaagctatcaaacaggctgtactatttgtcaattccaccaaacatattcgtggatgtggtaaggtgtgcaagccttagagcctcctcagtgaatggctggacaagagtcattgtcgaaaagccattcggtcgcgactctgaatcatctggagagttaaccagatgtcttaaacagtatctcacagaggagcaaatcttcaggatcgaccactatttgggaaaagaactcgttgagaacctttcagtgcttcgattctcaaatcttgttttcgagcctctttggtctagaaattacatacgcaacgttcaactcattttctctgaagactttggtacagaaggacgcggaggttactttgatcaatatggaatcatacgagacatcatgcaaaaccatctcttgcaaattcttgcacttttcgcaatggagacacctgtgagcttagacgctgaggacataaggagcgaaaaggtcaaagttctgaggtcaatgaaaccgttgctgcttcaagatatgattgtgggtcagtacaaaggtcatagcaagggtggaaaggcttatcctggttatacggacgacccaacagttcccacaaacagtctcactcctacatttgctgcagccgctatgttcatcaacaacgcgagatgggacggtgtccctttccttatgaaagctggaaaagctctgcataccagaggtgcagagatcagagttcagttcagacatgtcccggggaacttgtacaagaagaatttcgccactgatttagacaaggcaactaatgagctagtgatcagagttcaacctgatgaaggtatatacctgaggatcaacaacaaagtccctggtctcggaatgagactcgaccgaagcgaccttaaccttctctatcggtccaggtatccaagagagatcccagatgcatatgaaaggctgcttcttgatgctattgaaggagaaaggaggttgtttataagaagtgatgagttagatgcagcatgggatctattcacaccggctttgaaggagctcgagcacaagaaaatagttcctgagctatatccatatgggagcagaggtcctgttggcgctcattaccttgcatctaagtacaatgtgagatggggagatcttgaagatgcttaagcttttgacggaatcatggatatcaaattgatttggtgttaatttgggacgagctaactcttccatgtgttgtgagcttttacaacttttatcaaattcatcattacataggtttttttttgggccaaaaactatgtgtgatttcaactagtacatacattttgttcaaggaccgatgaccaaatgttagaattttatagttaactaggaaaaaaaaaaaataaaaaaaaaaaaaaa

SEQ ID NO: 686 - protein, 570 aa, Brassica napus
MATHTMIVRSSSSALAASSPLTETLPLFTTRSLTFPRKSSFSRLRLRFFAEKLSQLDSSNRCASLQDSGEHLTEEHDTKEESSTLSITVVGASGDLANKKIFPALFALFYEGCLPQDFSVFGYARTKLTHEELRVMISRTLTCRIDQRENCVDKMDQFLKRCFYHSGQYNSEDDFAELNTKLKEKEEGKLSNRLYYLSIPPNIFVDVVRCASLRASSVNGWTRVIVEKPFGRDSESSGELTRCLKQYLTEEQIFRIDHYLGKELVENLSVLRFSNLVFEPLWSRNYIRNVQLIFSEDFGTEGRGGYFDQYGIIRDIMQNHLLQILALFAMETPVSLDAEDIRSEKVKVLRSMKPLLLQDMIVGQYKGHSKGGKAYPGYTDDPTVPTNSLTPTFAAAAMFINNARWDGVPFLMKAGKALHTRGAEIRVQFRHVPGNLYKKNFATDLDKATNELVIRVQPDEGIYLRINNKVPGLGMRLDRSDLNLLYRSRYPREIPDAYERLLLDAIEGERRLFIRSDELDAAWDLFTPALKELEHKKIVPELYPYGSRGPVGAHYLASKYNVRWGDLEDA

SEQ ID NO: 687 - DNA, 2094 bp, Hordeum vulgare; identical to SEQ ID NO: 323
  CDS (41)..(1909)

SEQ ID NO: 688 - protein, 622 aa, Hordeum vulgare; identical to SEQ ID NO: 324

SEQ ID NO: 689 - DNA, 1470 bp, Saccharomyces cerevisiae
  CDS (1)..(1470)
atggctcggggtgacggacatctatggacagagacatatgatagttccacagtcgcttttatgattttaggtgccgccctggttttcttcatggtaccggggctgggctttctttattccggtttagcaagaagaaaatctgctctggctttgatttgggtagtgataatggctaccttagtaggtatactgcaatggtatttttggggctattctttagcattctctaagactgcgacgaacaacaaatttatcggcaacttggattcatttgggtttagaaacgtctatggcaaaatttcggatgattccacgtatcctgaactgatttatgccattttccaaatgatgttcatgtgtgtcgcattgagtattatagctggtgccactgcggaaagaggtaagctttttccacatatggtttttctttttgtttttgcgactttggtttactgtcccatcacttattggatttgggccccaggtggttgggcctaccaatggggggtattagactgggctggcggtgggaatattgaaatcctaagtgctgtggctggtttcgtttattcttattttctaggaagaagaaaagaaaacctcctgatcaactttagaccacataatgtttccatggtgactttgggtacttctatactttggtttggttggttgcttttcaatgctgcaagctcactgtcaccaaatatgaggtccgtatatgcgttcatgaacacttgtctcagcgccaccacgggtggaatgacgtggtgtttattagattatcgatctgaaaaaaaatggtccactgttgggttatgctccggcattatctgtggtttagttgctgccacgcctagctcgggttgtattactctatatggctctttgatccaaggtataatagcgggtgttgtttgtaattttgcaacaaaaataaagtattatttaaaagtggatgattccttagatctattagctgaacacggtatcgccggtgtggtgggattgatttttaacgctctatttgcagctgattgggttattggaatggacggcacaacaaagcataagggtggttggttgacgcataactggaaacaaatgtatattcaaattgcctatatcggtgcctctgccggctattgtgctgtggtcacggccatcatttgcttcgtattaggtaaaattccgggtgtccatctaagagtcactgaggaagccgaagcattggggttggatgaagatcaaataggcgaattcgcttacgattacgtggaggttaggagagattattaccagtggggtgtagatacagatgcacttcatactacatgcaatggcgctaattctgcgtctgagacaaatcctactgaggacagccaaaactcctcattgtcatcagctacagtaagcggccaaaacgaaaaaagtaataatcctaaattgcatcacgcaaaagaagcatga

SEQ ID NO: 690 - protein, 489 aa, Saccharomyces cerevisiae
MARGDGHLWTETYDSSTVAFMILGAALVFFMVPGLGFLYSGLARRKSALALIWVVIMATLVGILQWYFWGYSLAFSKTATNNKFIGNLDSFGFRNVYGKISDDSTYPELIYAIFQMMFMCVALSIIAGATAERGKLFPHMVFLFVFATLVYCPITYWIWAPGGWAYQWGVLDWAGGGNIEILSAVAGFVYSYFLGRRKENLLINFRPHNVSMVTLGTSILWFGWLLFNAASSLSPNMRSVYAFMNTCLSATTGGMTWCLLDYRSEKKWSTVGLCSGIICGLVAATPSSGCITLYGSLIQGIIAGVVCNFATKIKYYLKVDDSLDLLAEHGIAGVVGLIFNALFAADWVIGMDGTTKHKGGWLTHNWKQMYIQIAYIGASAGYCAVVTAIICFVLGKIPGVHLRVTEEAEALGLDEDQIGEFAYDYVEVRRDYYQWGVDTDALHTTCNGANSASETNPTEDSQNSSLSSATVSGQNEKSNNPKLHHAKEA

SEQ ID NO: 691 - DNA, 1215 bp, Bacillus subtilis
  CDS (1)..(1215)
atgcaaatgggcgatacagtttttatgttcttttgcgctttactcgtgtggctgatgaccccgggattagcgttattttatggaggaatggtaaagagcaaaaatgtgctgagcactgccatgcacagtttctcttccattgccatcgtttccatcgtttgggtgctgttcggatatacacttgccttcgcaccaggcaattcaatcatcggcgggctggagtgggcaggcctcaaaggggtcggatttgatccgggagattacagcgataccatcccccactcgttatttatgatgttccaaatgacgttcgccgttctgactacagcgattatttccggggctttcgcagagcggatgcgattcggcgcttttcttttattctcggttttatgggcctctttggtttacacacccgtagcgcactgggtatggggcggcggctggatcggccagcttggagcgctcgatttcgctggcggcaatgttgttcatatttcctccggggtggcaggacttgttcttgccattgtgctcggcaaacggaaagacggtacagcgtcttctccgcataacctcatttacaccttcttaggaggagctttgatttggttcggctggttcggctttaacgtcggcagcgcattgaccttagatggtgtggccatgtacgcgttcatcaacacaaacaccgcggctgcagccgggatcgccggctggatcttagtagaatggatcattaacaaaaaaccgacaatgctcggagcggtatctggggcaatcgccgggcttgtcgccattacgccggctgccggatttgtcacaccgttcgcttccattattatcggcatcatcggcggagctgtttgtttctggggagtattctcgcttaaaaagaaattcggatacgacgacgcgcttgacgcctttggcctgcacgggatcggcggcacatggggcggaatcgcaacaggattattcgcaacaacctctgttaactcagcgggcgcagatgggttattttacggtgatgcaagcttaatctggaaacaaatcgtcgccatcgccgccacttatgtttttgtatttattgtcactttcgttattattaaaattgtaagcctcttccttccccttcgcgcaactgaagaagaagagtcacttgggcttgacttaacgatgcacggggaaaaagcatatcaagattctatgtga

SEQ ID NO: 692 - protein, 404 aa, Bacillus subtilis
MQMGDTVFMFFCALLVWLMTPGLALFYGGMVKSKNVLSTAMHSFSSIAIVSIVWVLFGYTLAFAPGNSIIGGLEWAGLKGVGFDPGDYSDTIPHSLFMMFQMTFAVLTTAIISGAFAERMRFGAFLLFSVLWASLVYTPVAHWVWGGGWIGQLGALDFAGGNVVHISSGVAGLVLAIVLGKRKDGTASSPHNLIYTFLGGALIWFGWFGFNVGSALTLDGVAMYAFINTNTAAAAGIAGWILVEWIINKKPTMLGAVSGAIAGLVAITPAAGFVTPFASIIIGIIGGAVCFWGVFSLKKKFGYDDALDAFGLHGIGGTWGGIATGLFATTSVNSAGADGLFYGDASLIWKQIVAIAATYVFVFIVTFVIIKIVSLFLPLRATEEEESLGLDLTMHGEKAYQDSM

SEQ ID NO: 693 - DNA, 1224 bp, Methanobacterium thermoautotrophicum
  CDS (1)..(1224)
atgatgctaaattcaggtgatacagcatggatgttgatctcaactgcactcgtgatactaatgacggtgccaggggttgctatgttctattctggtttaacaaaacgtgagaatgttctgaacaccatctttctatcatttgtttcccttggcattgtgagtctgctctggtttctgtttggatatggtctaatattcggcggggatgtttcagggatcataggatcccatcaggtgggcatcagccttattaatttagggtctgcttcaaaatatgctccaacaatccccgaaggactctttgcaatttttcagatgacctttgctgcaataacagttgccctgatttctggcgctgtggtggaaaggatcaaattctcgtcatggatactgttcatccccctctggtttgcactcgtatatgtacccgtggcccactgggtatggggcggaggattcctgcagaaccttggtgttcatgatttcgcagggggaattgtggtgcacatcaccagtggcatagccgcccttgcccttgcccttgttactggtccaagatatgaccagaaactgatgccacatcaccttggatattctgttataggtaccggtcttctctggtttggctggtttggattcaacgccggttcagccctctctgccggatcccttgcagctaacgccatgatagtgacaaacacctctgcagcggcgggtatgataggatggatcctcatggatagacttaaaaccggaaaaccaacacttcttggcgctctttctggagcagttgcaggcctggcatcaataacacctgcagcaggttttgtggatataggtgcctccattgtcaccggacttgtggcagctgttatatgttatcttgcagtttcatggctgaagccagctgctggatatgatgatgcgcttgatgtatttgggattcacggtgtttcagggatcataggaacccttggagttggtttatttgcagttccagccctaaacccatctttgacctcaggaggtcttttaactggaagcacatcccttcttgtcagtcagctgattggtgttgtcaccgtcactgtctacaccttcgtcgttacatatatccttgcgatgctgctgatgaaatttaaggggctccgtgttgaaagggaagaggaaattcagggacttgacataaatctccatgaggaaacaggttacagactgacatga

SEQ ID NO: 694 - protein, 407 aa, Methanobacterium thermoautotrophicum
MMLNSGDTAWMLISTALVILMTVPGVAMFYSGLTKRENVLNTIFLSFVSLGIVSLLWFLFGYGLIFGGDVSGIIGSHQVGISLINLGSASKYAPTIPEGLFAIFQMTFAAITVALISGAVVERIKFSSWILFIPLWFALVYVPVAHWVWGGGFLQNLGVHDFAGGIVVHITSGIAALALALVTGPRYDQKLMPHHLGYSVIGTGLLWFGWFGFNAGSALSAGSLAANAMIVTNTSAAAGMIGWILMDRLKTGKPTLLGALSGAVAGLASITPAAGFVDIGASIVTGLVAAVICYLAVSWLKPAAGYDDALDVFGIHGVSGIIGTLGVGLFAVPALNPSLTSGGLLTGSTSLLVSQLIGVVTVTVYTFVVTYILAMLLMKFKGLRVEREEEIQGLDINLHEETGYRLT

SEQ ID NO: 695 - DNA, 1176 bp, Archaeoglobus fulgidus
  CDS (1)..(1176)
atgagtgacggaaatgtcgcatggatactcgcatccacggcccttgtaatgctgatggtgccgggagtggggttcttttacgcaggaatggtaaggagaaagaatgcagttaacatgattgcgctgagcttcatatcactcataatcacggttttgctgtggatattctacggctactcggtgagcttcggaaatgacatctctggaatcattggagggctgaattatgcactgctaagcggagttaagggggaggatttgctgttcatgatgtaccagatgatgttcgccgctgtcacaattgcaatcctcacctccgcaattgctgagagagcaaaagtttcatcgttcattctcctcagcgctctgtggcttacgttcgtttacgcccccttcgcacactggctttggggtggggggtggctggcaaagctcggcgccctcgactttgctggaggtatggttgttcacataagctcgggatttgctgcacttgcagtcgcgatgacgataggtaagagggcgggattcgaggagtactcgatagagccacacagcattccgctgacgctcattggcgctgccctgctttggtttgggtggttcggattcaacggcggaagtgcattggctgcaaacgatgtggccatcaacgccgtggtggtcacaaacacctcagcagcagtagcagggtttgtctggatggtaattggatggattaagggaaagccggggagtcttgggatagtgagcggtgcaattgctgggcttgccgccataacccccgcagcaggctttgtggatgtaaagggagcgattgtcataggtcttgtggctggaatagtatgctaccttgctatggacttcagaataaagaagaagatagacgagagccttgatgcttgggcgattcacggaataggcggtttatggggaagtgttgcagttggcattcttgcaaatccggaggttaacggatatgcaggcctactgttcggaaatccgcaactgctagtttcacaactgattgcggttgcatccacaacagcctacgccttcctcgtgacgctgatactggcaaaggctgttgatgccgctgtggggctgagggttagctcgcaggaggagtacgtcggtctcgacctgtcgcagcatgaggaggttgcctacacgtga

SEQ ID NO: 696 - protein, 391 aa, Archaeoglobus fulgidus
MSDGNVAWILASTALVMLMVPGVGFFYAGMVRRKNAVNMIALSFISLIITVLLWIFYGYSVSFGNDISGIIGGLNYALLSGVKGEDLLFMMYQMMFAAVTIAILTSAIAERAKVSSFILLSALWLTFVYAPFAHWLWGGGWLAKLGALDFAGGMVVHISSGFAALAVAMTIGKRAGFEEYSIEPHSIPLTLIGAALLWFGWFGFNGGSALAANDVAINAVVVTNTSAAVAGFVWMVIGWIKGKPGSLGIVSGAIAGLAAITPAAGFVDVKGAIVIGLVAGIVCYLAMDFRIKKKIDESLDAWAIHGIGGLWGSVAVGILANPEVNGYAGLLFGNPQLLVSQLIAVASTTAYAFLVTLILAKAVDAAVGLRVSSQEEYVGLDLSQHEEVAYT

SEQ ID NO: 697 - DNA, 1479 bp, Xylella fastidiosa
  CDS (1)..(1479)
atgcactctaactcttgccatcttagtgatatgaagaatggttttttcgcaatgttgaagagcctgttttatacgctctgtatattgatcgccttggctttgttggcaggtggcaatgcgatcggtcgtgcggaggctcaggtacaaaccaatcctttgcctagcgagcaagtcaccaccgaattgttgatgtctgaagcagccccttccgacgcggctgcaatacctaaaacgactccaacccccgtggtagacaagggggatgttgcttggatgctcacctcaacgctattagtgctactgatggtgttaccaggcttggcattgttttacggcggtatgttgcgctctaaaaacgtactatcgatcatggtacaaattggtgtggtgttttctctgatagccatcttgtgggtgctctacggctatagccttgcttttgctgatggtgacatgtttatcggtacattcaataaggcatttctttatggcgtagacactgcaacgttggccgataccttctctaaagggttcaaactgccggagtacctgtacgttgctttccagttgacttttgctggtatcaccggggtattgattgtcggtgcttttgcagaacgcgtgaaatttgctgcggtactgctgtttattttcatctggttttccttcggctacctgccactggcacacatggtgtggtcgacgccaggttttctgttgagcaagggggccttggattttgccggtggtactgttgtacatatcaatgctggtattgctggattggtcggtgcttactttgttggtaagcgttttggttttggccaggttgccgttaagccgcataacgtccccatgactttcactggtgctgcactgctatgggtcggttggttcggcttcaatgctggttcggcgttagaagccaatagcattgctgccttggctttcatcaacaccatgcttgcgactgctgctgcgatcctcgtttggtcgttgctcgaaaagatgaccaagggaaaattctcagccctgggtgttgcttcaggcatgattgctggtttagtaggcatcactccagcggcgggtacggttggtccgtttggtgcaattgcgattggtgctgttgccgccgtgtgctgtatctggggcatcactggactgaaaagattattgaaggtggacgataccttggacgtattcggcgtgcatggcattggtggcattgttggtgcgattttgactggggtttttaccgataaggcgctaggcggtcagggatatgctgaggggatgacaatgagcaatcaagtcatgattcaagccatgggtgtggggatcagcattgtgtggattggaatcgtttcgctggtaggtttcttaattgtcaaactgctgtttggcttgcgtgtgagcgaagaagctgaacgtgaaggattggacattacatcgcacggtgagtcggcgtacgagtcctga

SEQ ID NO: 698 - protein, 492 aa, Xylella fastidiosa
MHSNSCHLSDMKNGFFAMLKSLFYTLCILIALALLAGGNAIGRAEAQVQTNPLPSEQVTTELLMSEAAPSDAAAIPKTTPTPVVDKGDVAWMLTSTLLVLLMVLPGLALFYGGMLRSKNVLSIMVQIGVVFSLIAILWVLYGYSLAFADGDMFIGTFNKAFLYGVDTATLADTFSKGFKLPEYLYVAFQLTFAGITGVLIVGAFAERVKFAAVLLFIFIWFSFGYLPLAHMVWSTPGFLLSKGALDFAGGTVVHINAGIAGLVGAYFVGKRFGFGQVAVKPHNVPMTFTGAALLWVGWFGFNAGSALEANSIAALAFINTMLATAAAILVWSLLEKMTKGKFSALGVASGMIAGLVGITPAAGTVGPFGAIAIGAVAAVCCIWGITGLKRLLKVDDTLDVFGVHGIGGIVGAILTGVFTDKALGGQGYAEGMTMSNQVMIQAMGVGISIVWIGIVSLVGFLIVKLLFGLRVSEEAEREGLDITSHGESAYES

SEQ ID NO: 699 - DNA, 1545 bp, Arabidopsis thaliana
  Arabidopsis thaliana (mouse-ear cress)
  CDS (1)..(1545)
atggacaccgcaaccaccacatgctctgccgtagatctatctgccctcctatcctcttcttctaactcaacatcttccctcgccgcggcaacctttttatgttcccaaatttcaaacatctccaacaaactctccgacacaacttatgccgtcgacaacacgtatctcctcttctccgcctaccttgtctttgccatgcagctcggtttcgctatgctttgtgctggatcagtccgagccaagaacactatgaacatcatgcttaccaatgtccttgatgctgccgctggagccatctcttactacctcttcggattcgcattcgcctttggtacaccttccaacggattcatcggtcgccaccatagcttcttcgctttaagctcttaccctgaacgccccggctccgacttcagctttttcctctaccaatgggcttttgccatagccgcggccggaatcactagcggttccatcgccgagcgaacgcaattcgttgcttaccttatctactctactttcttgaccggttttgtttacccgacagtctcgcactggttctggtcaagtgatggatgggctagcgcgtcccggtctgacaacaatctcttgtttggctcaggtgctattgatttcgcaggttcaggagttgttcacatggtaggtggaattgccggtttatgtggagcgttagttgaaggaccaagaataggtagatttgaccggtcaggccggtccgtggctttacgtggtcacagtgcatcccttgtcgtgcttggtaccttcttgttgtggtttggatggtatgggtttaaccctggttcctttttaaccattcttaaaggctacgacaagtctcggccatattatggtcaatggagcgctgtaggtcgcaccgcggtcaccacaacgctttctggctgcaccgctgcgttgactactctattcagtaaacggcttttagcaggtcattggaacgttattgacgtatgcaacggacttctaggcggctttgcagctataacctccggatgtgccgtggtggagccgtgggctgctatagtatgtggctttgtggcatcatgggttttaatcggatttaacttgcttgccaagaaacttaaatatgatgacccactcgaggctgctcagctccacggtggatgtggagcatggggattaatctttaccgggctgttcgcaaggaaagaatacgttaacgagatttactccggtgataggccttacggactgttcatgggcgggggaggaaaactgctcgccgcgcagatcgttcagattattgtgatcgttgggtgggtgacggtaactatgggaccgttgttttatgggttacataagatgaatcttttgaggatatcagcagaagatgagatggcaggaatggacatgacacgtcatggaggatttgcttacgcatacaatgacgaagacgacgtgtcgactaaaccatggggtcatttcgctggaagagtggagcctacaagccggagctcgactcctacaccgaccttgactgtttga

SEQ ID NO: 700 - protein, 514 aa, Arabidopsis thaliana
  Arabidopsis thaliana (mouse-ear cress)
MDTATTTCSAVDLSALLSSSSNSTSSLAAATFLCSQISNISNKLSDTTYAVDNTYLLFSAYLVFAMQLGFAMLCAGSVRAKNTMNIMLTNVLDAAAGAISYYLFGFAFAFGTPSNGFIGRHHSFFALSSYPERPGSDFSFFLYQWAFAIAAAGITSGSIAERTQFVAYLIYSTFLTGFVYPTVSHWFWSSDGWASASRSDNNLLFGSGAIDFAGSGVVHMVGGIAGLCGALVEGPRIGRFDRSGRSVALRGHSASLVVLGTFLLWFGWYGFNPGSFLTILKGYDKSRPYYGQWSAVGRTAVTTTLSGCTAALTTLFSKRLLAGHWNVIDVCNGLLGGFAAITSGCAVVEPWAAIVCGFVASWVLIGFNLLAKKLKYDDPLEAAQLHGGCGAWGLIFTGLFARKEYVNEIYSGDRPYGLFMGGGGKLLAAQIVQIIVIVGWVTVTMGPLFYGLHKMNLLRISAEDEMAGMDMTRHGGFAYAYNDEDDVSTKPWGHFAGRVEPTSRSSTPTPTLTV

SEQ ID NO: 701 - DNA, 1287 bp, Salmonella enterica
  Salmonella enterica subsp. enterica serovar Typhi
  CDS (1)..(1287)
atgaagatagcgatgataaaaaccacactggcttcactggcgctgctgcctgggctaacgatagccgcgccggcggttgccgataaagcggatagtgcttttatgatgatttgcaccgcgctggtgctgttcatgacgataccgggtatcgcgctgttttacggcggattaattcgcgccaagaacgtgctgtcaatgttaacgcaagtgaccgtcacctttgcgctggtctgtattttatgggtggtgtacggctattcgctggcttttggcgaagggaatcattttttcggtaatgccgatggggcgatgttgaagaatatcgcgttgacggcggtaacgggtacgatttatcagtatattcatgtcgcgtttcagggatctttcgcctgtattaccgtcgggctgattgtcggcgcgctggcggagcgtattcgtttttcggcggtactgatttttgtcgtggtgtggttcacgctctcttatatcccgattgcgcacatggtgtggggcggcggcctgctggctgctcacggcgcgctggattttgctggtggtacagtggtgcatattaacgccgctatcgctgggctggtgggggcttatttaattggcaaacgcgtcggctttgggaaggaagcatttaaaccccataacctgccgatggtctttaccggtactgcgattctgtatatcggctggtttggatttaacgcgggttctgccggtagcgcaaacgagatagcagcgctggcctttgtgaacaccgtggtggcgaccgccgccgcgattctggggtggattatcggcgagtggacgctacgcggtaagccttccctgctgggagcgtgttccggcgcgattgccggtctggtcggcgtgacgccagcctgtggctatgttggcgttggcggcgcgctggttatcggcgttattgcgggtctggcgggattgtggggagtcaccatgcttaaacgtctgctacgggtagatgatccgtgcgacgtatttggcgttcacggcgtttgcggaatagtcggctgtatcctgaccggcgtttttgccgccagttcgctgggcggcgttggctttgtcgacggcgttacgatgggacatcaggtgatggtacagctggaaagtattgctattacggtcgtctggtccggcgttgtcgcgtttgttggttacaaactggcggatatccttgttggactgcgtgtaccggaagagcaggagcgcgaggggctggatgtgaacagtcacggcgagaatgcgtataacgcgtga

SEQ ID NO: 702 - protein, 428 aa, Salmonella enterica
  Salmonella enterica subsp. enterica serovar Typhi
MKIAMIKTTLASLALLPGLTIAAPAVADKADSAFMMICTALVLFMTIPGIALFYGGLIRAKNVLSMLTQVTVTFALVCILWVVYGYSLAFGEGNHFFGNADGAMLKNIALTAVTGTIYQYIHVAFQGSFACITVGLIVGALAERIRFSAVLIFVVVWFTLSYIPIAHMVWGGGLLAAHGALDFAGGTVVHINAAIAGLVGAYLIGKRVGFGKEAFKPHNLPMVFTGTAILYIGWFGFNAGSAGSANEIAALAFVNTVVATAAAILGWIIGEWTLRGKPSLLGACSGAIAGLVGVTPACGYVGVGGALVIGVIAGLAGLWGVTMLKRLLRVDDPCDVFGVHGVCGIVGCILTGVFAASSLGGVGFVDGVTMGHQVMVQLESIAITVVWSGVVAFVGYKLADILVGLRVPEEQEREGLDVNSHGENAYNA

SEQ ID NO: 703 - DNA, 1206 bp, Listeria monocytogenes
  CDS (1)..(1206)
atggaatcagtatttatgttcttttgtactttattggtttggttgatgacaccaggaatcgcattattttacggcggtatggttcgacgcaaaaatgtgttgagtactgcaatgtatagttttagttcgatggcaattatttctattctttgggtgattgttggttattcgttagctttcgcccctgggaacggctttataggtagttttgattggaccttccttcataatgtcggttttgcggcaaatgctacttactcagacgccattccacatgttctattcatgatgtttcaaatgacttttgctattttgactgtagctatcatttctggggcatttgcagaacggatgaatttctccgcttacttgattttcattatcttatggtcattacttgtttattcccctgtcgctcattgggtttggggtgatggcggttggttacgtaatcttggagcacttgattttgctggtggaaatgtggttcatattagttccggtgtaacaggattagtacttgcgattatgattggacgaagaaaagaagccgactctgcttctccgcacaatttaccacttgcgcttattggtgggattctagtttggtttggttggtatggttttaatgttggtagcgcccttacaattgataatgtggctatgacagcttttgttaatacgaatacggcagctgctgcaggtattatcggttggggtttggttgaatggttgacgaataaaaagccaactatgcttggaaccatttccggagcaattgctggtttagtatccattacccctgccgctggatttgttaccgttccaagttcacttatcattggtttcttcggcggagcactatgtttctgggctgtgttctggttgaaaggaaaagtaaaatatgatgatgcacttgatgcattcggtcttcacggaatcggaggtatttggggaggtattgcaactggactttttgctacaacaaaagtaaatgaagctggagcagatggattattttatgggaatgcttctctagtagtaaaacaattaattgcaatcggctcaacagtggcatatgtagctgtagtaacagctctaatcgtcgtaattatcaaactatttttaccaatccgtgtaaatgaagaacaagagtacaaaggacttgatttgacactgcacggcgaaaaagcatatcaagaataa

SEQ ID NO: 704 - protein, 401 aa, Listeria monocytogenes
MESVFMFFCTLLVWLMTPGIALFYGGMVRRKNVLSTAMYSFSSMAIISILWVIVGYSLAFAPGNGFIGSFDWTFLHNVGFAANATYSDAIPHVLFMMFQMTFAILTVAIISGAFAERMNFSAYLIFIILWSLLVYSPVAHWVWGDGGWLRNLGALDFAGGNVVHISSGVTGLVLAIMIGRRKEADSASPHNLPLALIGGILVWFGWYGFNVGSALTIDNVAMTAFVNTNTAAAAGIIGWGLVEWLTNKKPTMLGTISGAIAGLVSITPAAGFVTVPSSLIIGFFGGALCFWAVFWLKGKVKYDDALDAFGLHGIGGIWGGIATGLFATTKVNEAGADGLFYGNASLVVKQLIAIGSTVAYVAVVTALIVVIIKLFLPIRVNEEQEYKGLDLTLHGEKAYQE

SEQ ID NO: 705 - DNA, 1413 bp, Nostoc sp.
  Nostoc sp. PCC 7120
  CDS (1)..(1413)
atgtttcagaaaattttgataattggggtgagtaccctactactgctgacaagtcccatcatgggtaatgcttgggcgcaagtcccagggacgactccacctgctgatacgggagatacggcatttatgctgatttcagcagccctagtcttgctgatgacaccaggattagcatttttttatggtggtttcgtccgatcgcgcaatattctcaatacattgatgatgagctttgtattgatggcgattgtgggcgttacctgggttttatggggttatagtctgtcgtttgccccagggctgccatttattggtggtttacagtggtttgggttaaacggtgtggggctagaaaccacaggttatctgcaaggttccgagcctgcgaatgtggtttcctatgccgggacgattccccatcaggcatacatgatatatcaagccatgtttgccattatcaccccagctttaatttctggtgcgatcgccgaacgaatgagtttccgtgcctattgcctatttgtgctactgtggtcaacctttatttacacgcctctagcccacatggtttgggcaaaaggtggattcttaggtttgtatggcggcttaggtgcgctcgacttcgccggcggtacagtagttcatattagctctggggtttctgccctcgtcgccgcaatagtcctggggccaaggaaaacccatcccgatcgcctcagccctccccacaacgtaacatttattttgttgggtgctggcttgctatggtttggctggttcggttttaacgctgggagtgccttatcagttgctagcagcacttctggcagtttcatcactaatccagctacaactgcctttgttgccaccaacacctcagccgcagccggagctttaatgtggctaattctagaaggagtattacgcggtaaacccaccgccgtaggtgcagctacaggcgcagttgccggtttagtaggtataaccccagccgccggctttgtcacccctctagcgtcaattttgataggttttatcacagcttttgtttgcttttatgccgtaagtttcaaacacaagctaaatgttgatgatgccttagatacctacccggtgcatggtgttggtggaacagttggcgcaattctcacagctttctttgccaccgccgaagttaactcaggtggtaaaaacggcgtactcaagggtaattttggtgaactaggtgtggaactagccgccattgtcatcgcctatgtaattgcagcagttggtacttggataatcttgaagattattgatgctaccgttggcttacgggtgaaagaagaagcagaataccaaggtttggatatcagcgaacacggagaagaagcatataactccgagtttagcgatcgcatcgtaccgtaa

SEQ ID NO: 706 - protein, 470 aa, Nostoc sp.
  Nostoc sp. PCC 7120
MFQKILIIGVSTLLLLTSPIMGNAWAQVPGTTPPADTGDTAFMLISAALVLLMTPGLAFFYGGFVRSRNILNTLMMSFVLMAIVGVTWVLWGYSLSFAPGLPFIGGLQWFGLNGVGLETTGYLQGSEPANVVSYAGTIPHQAYMIYQAMFAIITPALISGAIAERMSFRAYCLFVLLWSTFIYTPLAHMVWAKGGFLGLYGGLGALDFAGGTVVHISSGVSALVAAIVLGPRKTHPDRLSPPHNVTFILLGAGLLWFGWFGFNAGSALSVASSTSGSFITNPATTAFVATNTSAAAGALMWLILEGVLRGKPTAVGAATGAVAGLVGITPAAGFVTPLASILIGFITAFVCFYAVSFKHKLNVDDALDTYPVHGVGGTVGAILTAFFATAEVNSGGKNGVLKGNFGELGVELAAIVIAYVIAAVGTWIILKIIDATVGLRVKEEAEYQGLDISEHGEEAYNSEFSDRIVP

SEQ ID NO: 707 - DNA, 1296 bp, Yersinia pestis
  CDS (1)..(1296)
atgatgatgaaaaaacttttatccgtgttgggcctgggtacggtagcgctgttaccttcttgggcaatggcggcggcaccggcagtcgctgacaaagcagataatgcttttatgatgatttgcactgcgttagtactgtttatgacgatacccggtattgccctgttctacggtggcctgttgcgctccaaaaacgtattgtcaatgatgactcaggtcatggtgagttttgcgctggtatgtgttttgtggattctctacggctacagcctggcgtttagtgcgggtaatgcgttcttcggcagttttgatatggccatgctgaaaggtattgagctgactagcctgagtggctcgttctatcaatatattcatgtcgtgttccaagcctcatttgcctgtatcaccgtcgctctgattgtgggttcattcgcagagcgtattcgtttctcagcagtattaattttcgccgcgctgtggttcaccttctcttacctaccaatagcgcacatggtatggggtggtggtttcctggcaatggacggagcgctggattttgctggtggtacagtggtgcacattaacgccgctgttgctggtttggtcggggcttatctgttgggtaaacgtgccggattcggtaaagaggccttcaaaccccataacttaccgatggtctttaccggtacggcgattctgtatattggctggtttggcttcaatgctggttcagccagtgctgcgaacgaaattgcagcgctagcgttcttgaataccgtcgttgcaacggcgggcgccatcctctcgtgggtatttgctgagtgggctttacgaggtaaaccttcgctgttgggggcatgttccggttgtatcgcaggcttggttgcgattactccggcagcaggtacggtaggggttggcggtgcattgattatcggtttggttggtggtgttgctggcctgtggggggtcgtgctactgaaaaaatggctgcgggtcgatgatacctgtgatgtcttcggtgttcatggtgtgtgtggcatcgtcggttgtattctgacgggtgtcttcacctcggcgtcgctgggcggcactggttatgctgctggcgtaaccatggggcatcaggtcggcgttcagttattcagtgttggtgtgactgttgtctggtcgggtgttgttgccttcgttgcctttaaaattgcgggcttgattgtgggcctacgggtacccgaagagcaagagcgtgaaggtctggatgttaacagtcacggtgaaaacgcatataatcaataa

SEQ ID NO: 708 - protein, 431 aa, Yersinia pestis
MMMKKLLSVLGLGTVALLPSWAMAAAPAVADKADNAFMMICTALVLFMTIPGIALFYGGLLRSKNVLSMMTQVMVSFALVCVLWILYGYSLAFSAGNAFFGSFDMAMLKGIELTSLSGSFYQYIHVVFQASFACITVALIVGSFAERIRFSAVLIFAALWFTFSYLPIAHMVWGGGFLAMDGALDFAGGTVVHINAAVAGLVGAYLLGKRAGFGKEAFKPHNLPMVFTGTAILYIGWFGFNAGSASAANEIAALAFLNTVVATAGAILSWVFAEWALRGKPSLLGACSGCIAGLVAITPAAGTVGVGGALIIGLVGGVAGLWGVVLLKKWLRVDDTCDVFGVHGVCGIVGCILTGVFTSASLGGTGYAAGVTMGHQVGVQLFSVGVTVVWSGVVAFVAFKIAGLIVGLRVPEEQEREGLDVNSHGENAYNQ

SEQ ID NO: 709 - DNA, 1206 bp, Listeria innocua
  CDS (1)..(1206)
atggaatcagtatttatgttcttttgtactttattggtttggttgatgacaccagggattgcattattttatggtggtatggttcgccgcaaaaacgtgttaagtacagcaatgtatagttttagctctatggcaattatttctattctttgggtgattgttggctactcgttagcttttgcacctggaaatggctttatcggcagtttcgactggactttccttcataatgtcggttttgcggcaaatgacacttactcagatgcaattccacacattctgtttatgatgttccaaatgactttcgctattttaacagtagctatcatttctggggcatttgctgaacggatgaacttctctgcttacttgatttttattattttatggtcgttactagtatattcccctgttgcacactgggtttggggcgacggtggttggttacgcgagctaggagcacttgatttcgctggtggaaatgttgttcatatcagttcaggtgtaacgggtcttgtcttagctataatgattggccgcagaaaagaagctgattctgcttcacctcataacctcccgcttgctcttattggtgggattctagtctggtttggttggtatgggtttaatgtcggtagcgccctcacgattgataatgtagcgatgactgcatttgttaatacgaatacagcggctgcagctggaattattggctggggattggttgaatggttaatcaataaaaaaccgactatgcttggaacaatttctggcgctatcgctggtttagtgtccattacacctgctgccggtttcgttacagtacctagctctttgattatcggctttcttggcggagcactttgcttctgggcagtattctggttgaaaggaaaagtgaaatatgatgatgcgcttgacgcgtttggcttacacggaattggcggaatttggggcggcatcgctactggactttttgccacaacgaaggtaaatgaagctggagcagatggtctcttttacggtaatgcttccttagttgtaaaacaattaatcgcaattggctctactgtcgcatatgttgcagtagtcacagctctaattgtcgtagtaatcaaactatttttaccaattcgcgtaaacgaagaacaagaatacaaaggacttgatttgacgctacacggcgaaaaagcatatcaagaataa

SEQ ID NO: 710 - protein, 401 aa, Listeria innocua
MESVFMFFCTLLVWLMTPGIALFYGGMVRRKNVLSTAMYSFSSMAIISILWVIVGYSLAFAPGNGFIGSFDWTFLHNVGFAANDTYSDAIPHILFMMFQMTFAILTVAIISGAFAERMNFSAYLIFIILWSLLVYSPVAHWVWGDGGWLRELGALDFAGGNVVHISSGVTGLVLAIMIGRRKEADSASPHNLPLALIGGILVWFGWYGFNVGSALTIDNVAMTAFVNTNTAAAAGIIGWGLVEWLINKKPTMLGTISGAIAGLVSITPAAGFVTVPSSLIIGFLGGALCFWAVFWLKGKVKYDDALDAFGLHGIGGIWGGIATGLFATTKVNEAGADGLFYGNASLVVKQLIAIGSTVAYVAVVTALIVVVIKLFLPIRVNEEQEYKGLDLTLHGEKAYQE

SEQ ID NO: 711 - DNA, 1320 bp, Deinococcus radiodurans
  CDS (1)..(1320)
atgaaacgcgccccctacactgccgctgctactactgccgccctgctgctcttgcccctgctctcgacggccttcgctgccgacgccaagccgcacctcgacaccggcgacaccgcctggatgctgatgtcggcggcgctggtgttcctgatgacgcccggcctcgccttcttttacggcggcctgacccgcgcccagagcgtgctgaacaccatgatgatgagcatggtcagcatcggcctggtcggggtgctgtggatgctcgccgggtactcgctcgccttcggggatggcggcgcgtggctgggggacttcgcgcacctcggtctgaatgggttggcggggcagctcaccggcaccattcccacttacgtcttcgcctcgtttcaggccatgttcgccatcatcgccgtcgcgctgatttcgggcgcggtggtcgagcggatgcgcttcggcgcctttatcctcttcgccgcgctgtggactctgatcatctactcgccgctcgcccactgggtctggggcgccaacggctggctgttcaaggatggcgcgctcgattttgcgggcggcaccgtcattcacatctccgccggggtgtccgcgctggtggcggcctggctgctggggccgcgcctgggctacccgcgcaacgcccacgtgccgcacaacgtcccgctggtgttgctcggcgccgggctgctgtggttcggctggatgggctttaacgcgggctcggcgctgggggccaatcagacggcggcccttgccttcatcaccaccctgattgcgcccgccgccgccatgctgacctggctgggctgggaaagcctgagcagcaagccgaccgccgtgggcgccgccaccgggctggtcgtggggctggtcgccatcaccccagcgtgcgccttcgtgtcgccctgggccgccgtgctgctgggcatcctgggtgccaccgcgagctactggaccgtgcaggccaagcaccgcctgatggccgacgacgcgctggacgtgttcgcctgccacggggtcgcgggcatcgtgggggcgctgctcaccggtctgctcgcctggaccaccggcagcggcaagccgattggcgcgcagttcatgactcagctcatcagcgtggtcgcctcgctgctctacgcgggggtcggcagcttcatcctgctcaagctggtgtcgctggttattccactgcgggtgccggcagggcaggaaatcgcaggcatcgacctcagcgcccaccaggagcagggctacagcgaaaacgaactcggcatcggggcgccagtgttcctgggcggtgactga

SEQ ID NO: 712 - protein, 439 aa, Deinococcus radiodurans
MKRAPYTAAATTAALLLLPLLSTAFAADAKPHLDTGDTAWMLMSAALVFLMTPGLAFFYGGLTRAQSVLNTMMMSMVSIGLVGVLWMLAGYSLAFGDGGAWLGDFAHLGLNGLAGQLTGTIPTYVFASFQAMFAIIAVALISGAVVERMRFGAFILFAALWTLIIYSPLAHWVWGANGWLFKDGALDFAGGTVIHISAGVSALVAAWLLGPRLGYPRNAHVPHNVPLVLLGAGLLWFGWMGFNAGSALGANQTAALAFITTLIAPAAAMLTWLGWESLSSKPTAVGAATGLVVGLVAITPACAFVSPWAAVLLGILGATASYWTVQAKHRLMADDALDVFACHGVAGIVGALLTGLLAWTTGSGKPIGAQFMTQLISVVASLLYAGVGSFILLKLVSLVIPLRVPAGQEIAGIDLSAHQEQGYSENELGIGAPVFLGGD

SEQ ID NO: 713 - DNA, 1266 bp, Bacillus halodurans
  CDS (1)..(1266)
atggattccattgctttaatggataacgtgtggattatgctatgtgccgttcttgttttgttaatgcaaggtggatttattttacttgaagctggctcaacaagaatgaagaacgctggtcatattgccggaaaaacgattttcacagttgggattgcatccctcgtttattgggcagtaggctgggggttcacttacggagaggggaacgcttttatcggtctttctgatttcttcttcggcgattactcaacggctgaagagggactagtcggctcggtcgatttctttttccaattaatgttcgctgccattgcgctcacgattgcgtttggtggatttgctgagcgtgcgaagctatcagtctatatcctgtttgcggttttgttttctgcattcgtttatccaattgtcgctcactggatttggggagatggctggcttgctgacttaggaaaacaagactttgcaggttcgaccgtcgttcacttaacgggtgcgatgggggctctagcagctacgatcttattaaagccgcgtttaggcaaatacaacaaagatggctcgatgaacgatattcaaggtcacaaccaagtgtatacagcattgggtgtattgcttctttgggtcggttggttcggcttcaacgcaggtagtacgctagaagtggccgacgcattcttcggttatgttgcgttaaatactcagcttgctgccgctgcaggtgcagtcgctgccatgttcattgcatgggctctatcaggaaaagcagatgtaccgacaaccttgaatggagcattagctggtcttgttgcgatcacagcgtcatgtgcgttcgttgcgccttgggccgcagttgtcatcggaattgttggtggacttatcgtttacttcagcatgaaatttttcgataaagcgaaaattgatgacccaatctttgctctctcggtccatggtgtggccggggtgtgggggacactttctacagggttctttgccactcctgagcttgcagagatgaacggtggtcaagcgggcttgttctacggcggtggttttgcacaattaggtgttcaaacgttgagcgttgtcgcttgtggtgtgttcgcttttatcgcttcatacgtactactccttgtatgtaagtctgtactcggtggtcttcgtgtaacagaagaagaagaaatcattggtcttgacttaagtgagcatggaagctacggatatcctgaaagcatgccaggttccgaaaaatcaggagcataa

SEQ ID NO: 714 - protein, 421 aa, Bacillus halodurans
MDSIALMDNVWIMLCAVLVLLMQGGFILLEAGSTRMKNAGHIAGKTIFTVGIASLVYWAVGWGFTYGEGNAFIGLSDFFFGDYSTAEEGLVGSVDFFFQLMFAAIALTIAFGGFAERAKLSVYILFAVLFSAFVYPIVAHWIWGDGWLADLGKQDFAGSTVVHLTGAMGALAATILLKPRLGKYNKDGSMNDIQGHNQVYTALGVLLLWVGWFGFNAGSTLEVADAFFGYVALNTQLAAAAGAVAAMFIAWALSGKADVPTTLNGALAGLVAITASCAFVAPWAAVVIGIVGGLIVYFSMKFFDKAKIDDPIFALSVHGVAGVWGTLSTGFFATPELAEMNGGQAGLFYGGGFAQLGVQTLSVVACGVFAFIASYVLLLVCKSVLGGLRVTEEEEIIGLDLSEHGSYGYPESMPGSEKSGA

SEQ ID NO: 715 - DNA, 1239 bp, Methanobacterium thermoautotrophicum
  CDS (1)..(1239)
atggagatgactctgatggatgcggtcttaaactccggtgacactgcctggatgctggtatcaacagccctggtaatgctgatgacggttccaggcgtggcactattctacgggggtttaacaaaaaaggaaaacgtgctgaacaccatgttcctatccctgatagccttcgcagtgacgagcataatatgggtactctacggctatcagttcgcctttggagctgacataatggggttcataggaagtccagtgaacctgctgatgaacggggtcggtgttaacactgctgctgcactggcaccaacaataccagacttcctctacatagcattccagttaacattcgcagcaataacggttgcactcatatccggtgccgtcgttgaaaggatgaagttctcagcctggctggcattcattgtgctctgggtgagcctggtctacgtgccggtggcccactgggtatggggcggaggattcctggcgcagctcggtgccctggacttcgcaggcggtactgtggttcacatcaactcaggtgttgcagcactcgcactcgtctacctcctcggtaagagaaaggacacgagacttctgccacacaacctgggatactcagtgataggtgcttcactgctctggttcggctggtttggattcaacgccggttcagcactcacggcaggtggacttgcagcatcagccttcctggtgaccaacactgcggcggctgctggtatggtatcatgggttataatggactacctcaaggtgggtaaacccacagtactcggcggaatatccggtgcagttgctggcctcgtcgccataacacctgcagcaggtttcgtaactgtacctgcagccctcatcataggccttgtcacgagcgtaatatcataccttgcagtatcatacctcaaaccaaggcttggatacgacgatgccctggacgtcttcggaatacacggcatgtcaggtatatggggctcagtggcaacaggcctctttgcagcgccattcatcaacgaactgggaacaggcctcatatacggaaaccctggacagctgacagcacaggtgatagccgtggcagttgtggctgcctactccttcgtggtgacactgatcatcggcaaactcctggacttcaccgttggtctgagggtgagcggtaaggaggagatggagggccttgacacccacctgcatgaggagacaggctacaggatctga

SEQ ID NO: 716 - protein, 412 aa, Methanobacterium thermoautotrophicum
MEMTLMDAVLNSGDTAWMLVSTALVMLMTVPGVALFYGGLTKKENVLNTMFLSLIAFAVTSIIWVLYGYQFAFGADIMGFIGSPVNLLMNGVGVNTAAALAPTIPDFLYIAFQLTFAAITVALISGAVVERMKFSAWLAFIVLWVSLVYVPVAHWVWGGGFLAQLGALDFAGGTVVHINSGVAALALVYLLGKRKDTRLLPHNLGYSVIGASLLWFGWFGFNAGSALTAGGLAASAFLVTNTAAAAGMVSWVIMDYLKVGKPTVLGGISGAVAGLVAITPAAGFVTVPAALIIGLVTSVISYLAVSYLKPRLGYDDALDVFGIHGMSGIWGSVATGLFAAPFINELGTGLIYGNPGQLTAQVIAVAVVAAYSFVVTLIIGKLLDFTVGLRVSGKEEMEGLDTHLHEETGYRI

SEQ ID NO: 717 - DNA, 1305 bp, Neisseria meningitidis
  CDS (1)..(1305)
atgaaaaaacacatatgggcggcatctttgctgccggcatccctatcggcagaacctttaaactggtggaagccttattccgccgtcaattcgggcgataccgcctgggtgatgactgcggctgccttggtactgttgatgacgcttcccgggctggctttattctacggcgggatggtgcggaaaaaaaacctgctctcgacgatgatgcacagcttttccatcgcgacattggtgggcatcctttgggtcgccgtcggctattctttagcgttcacgccgggaaatgcctttatcggcggtttggggcgcgtatttttaagcgggatgcagatagacgctgccgcacagatgctgaccgtgtcgcccaatgcgccgactgttcccgaaccggtatttatgttttttcagatgacgtttgccattatttcgaccgccattattaccggcgcgtttgccgaacggatgaaatattcggcaatgatgctgttttcgggcatatggtttttattggtttatgtgccgggagcgcattgggtgtggggcggcggctttatgagcaagggcggcgtattggattatgccggcggtacggtggtgcacatcaatgccggtatcgcgggactcgtcgccgccttggttttgggcaggcgcataggctacgggcgcgaggcgatgcctccgcacaatatggcgatgacactgatcggcgcggcaatgttgtggttcggctggttcggctttaacgccggatcggcgcttgcggcagacgcggcggcgggtatggcgatggcggtaacgcaggtgtcggccgtattcggcgcggcaggctggcttgcctgcgaaaaaatagcgggacacaaaccttccgctttggggctggcttccggcgcggtttccggtctggtcggcatcacccctgccgccggctttaccggcccgtcgggcgcggccgccatcggtatattgactgccgccgcgtgctttgtgtccgtcaccgtcgtcaaacacaaattgcgttacgatgattctttggacgctttcggcatacacggattcggcgggctggtgggcggaatattgaccggcatctttttcgacaaccgcattttcggcggggatgcggcagtttggcagcagttgtggatacaggtaaaagacgggttcgttatggcggcatacagcgggctgatgagttgggcgattttgaaggtcgtggggaaaatctgcggcggcctgcgcgtcggcaaggatgtcgaacgcgaaggtttggatctgaatatccacggcgaacgcgtggaataa

SEQ ID NO: 718 - protein, 434 aa, Neisseria meningitidis
MKKHIWAASLLPASLSAEPLNWWKPYSAVNSGDTAWVMTAAALVLLMTLPGLALFYGGMVRKKNLLSTMMHSFSIATLVGILWVAVGYSLAFTPGNAFIGGLGRVFLSGMQIDAAAQMLTVSPNAPTVPEPVFMFFQMTFAIISTAIITGAFAERMKYSAMMLFSGIWFLLVYVPGAHWVWGGGFMSKGGVLDYAGGTVVHINAGIAGLVAALVLGRRIGYGREAMPPHNMAMTLIGAAMLWFGWFGFNAGSALAADAAAGMAMAVTQVSAVFGAAGWLACEKIAGHKPSALGLASGAVSGLVGITPAAGFTGPSGAAAIGILTAAACFVSVTVVKHKLRYDDSLDAFGIHGFGGLVGGILTGIFFDNRIFGGDAAVWQQLWIQVKDGFVMAAYSGLMSWAILKVVGKICGGLRVGKDVEREGLDLNIHGERVE

SEQ ID NO: 719 - DNA, 1329 bp, Pseudomonas aeruginosa
  CDS (1)..(1329)
atgactctgcgtaagatcgcagggctaggagccctattgtccctcgctttgccgggcgtcgccctggccgccgaggagcccgtcctgaacagcggcgacaccgcctggatgctgatctccactgcgctcgtcctgctcatgaccatccccggcctggcgctgttctacggcggcatggtgcgagcgaagaacgtgctgtcgatcatgatgcagtgcttcgccatcaccggcctgatcaccattctctgggtggtctatggctacagcctggcgttcgataccgccgggatggagaagggcgtcctcaacttcaattccttcgtcggcggactggacaaggccttcctcagcggtctcaccgccgacggcctgacttccgccaccgcgctgttcccggaaagcgtgttcatcaccttccagatgaccttcgcgatcatcactccggcgctgatcgtcggcgccttcgccgagcgcatgaagttctcggcgatgctgatcttcatggcggtctggttcaccgtggtctacgcgccgatcgcgcacatggtctggagcggtgacggcgccctgatgtgggactggggcgtgctggacttcgccggcggcaccgtggtgcacatcaacgccggtatcgccggtctggtcgcctgcctggtgctgggcaagcgcaagggctacccgaccacgccgatggcgccgcacaacctcggctacaccttggtcggggcggccatgctgtggatcggctggttcggtttcaacgccggttccgccgccgccgccaacggcaccgccgggatggccatgctggtgacccagatcgccaccgccgccgcggccctggcctggatgttcgccgagtggatcacccacggcaagccgagcgccctgggcatcgcgtccggcgtggtcgccggtctggtggccatcaccccggccgccggcaccgccggtccgatgggcgcgctggtgatcggcctggcctccggggtgatctgtttcttcgccgccaccagtctcaagcgcgcgctgaaatacgacgattccctcgacgccttcggcgtacatgcggtcggcggtatcgtcggcgcgctgctcaccgggatcttcgcggcgccgtcgctgggcggcttcggcagcgtggaggacatcggcgcgcagttcttcgtgcagttcaagggcgtggccttcaccgtggtctacaccgccgtggtgaccttcgtgatcctcaaggtgctggacctggtcatgggcctgcgggtcaccgaggaagaggaagcggtcggcctcgacctggcgctgcacaacgagcgcggctacaacctgtaa

SEQ ID NO: 720 - protein, 442 aa, Pseudomonas aeruginosa
MTLRKIAGLGALLSLALPGVALAAEEPVLNSGDTAWMLISTALVLLMTIPGLALFYGGMVRAKNVLSIMMQCFAITGLITILWVVYGYSLAFDTAGMEKGVLNFNSFVGGLDKAFLSGLTADGLTSATALFPESVFITFQMTFAIITPALIVGAFAERMKFSAMLIFMAVWFTVVYAPIAHMVWSGDGALMWDWGVLDFAGGTVVHINAGIAGLVACLVLGKRKGYPTTPMAPHNLGYTLVGAAMLWIGWFGFNAGSAAAANGTAGMAMLVTQIATAAAALAWMFAEWITHGKPSALGIASGVVAGLVAITPAAGTAGPMGALVIGLASGVICFFAATSLKRALKYDDSLDAFGVHAVGGIVGALLTGIFAAPSLGGFGSVEDIGAQFFVQFKGVAFTVVYTAVVTFVILKVLDLVMGLRVTEEEEAVGLDLALHNERGYNL

SEQ ID NO: 721 - DNA, 1533 bp, Caulobacter crescentus
  CDS (1)..(1533)
atgaaactcaccttcaaaccgctggcggggcttatgctcgccgcgaccatcgcgggggctccgctgggggcgaccgccttcgcccaggaggccgcgcccgcgccggtcgccgccgcgcccgccgaggccgcgccggctccggccgccgcccctgctgaagccgcgcctgcgccggccgccgccccgaccatcgaagacaagatggacaagggcgacaacgcctggatgctcacctcggccctgctcgtcctgctgatgatcctgccgggtctggcgctgttctacggcggcctagtccgcgccaagaacatgctgtcggtgatgatgcaggtctcgaccgtcgccctgatcggcttcgtcgcctggatgctctggggctacagcttcgccttcacggacggcggcagctgggacaagttcgtcgggggtctgggtcgcgtgttcctgaacggcgtgacccctgcgagcaacgtggcgaccttctccacgggcgtggtaatcccggaactgaccttcatcgccttccagtcgaccttcgcggcgatcaccgccgccctcgtggtcggttcgctggtcgagcgcatgaagttcgccgccatcgtcgccttcgccatcctgtggccgctgctgtcgtactatccgatcgcgcacatggtctggtggtggccgggcccgaacgccatcgccctggcgcctgaagatacggtcaagtcgggcctgctctggggcttcggcgccctggacttcgccggcggcaccgtggtgcacatcaacgccggtatcgccgcgctcgtcggcgctctgatcctcggcaagcgccaaggctacggcaaggagccgatgcccccgcactcgctgaccctgaccctggtgggcgctggcctgctgtgggtgggctggttcggcttcaacgccggctcgaacctggagtcgaacggctacgcctcgctggccatggtcaacaccttcatcgccaccgccggcgcgggtctgtcgtggatcctcgttgagtgggtcacccgcaagaagccgtcggccctgggcctggcttcgggcatcgtggccggcctcgtcgccgtgaccccggccgccggcttcgccggcccgatgggcgcgctgatcctgggcctcgtcgtctcgccgatctgcatcatcttctgctcggtcgtgaagaacgccctgaagtacgacgacagcctggacgccttcggcatccacggcatcggcggcatcgtcggcgccatcggcaccggcctggtggtcaaccccgcctggggcggcgccggcgtcgtcgactacacgagctgcggcaaggacggcgacctgtcgacctgcgacaccgccgtgtacgacatgggcgtgcaactgatggcgcagctgaaagctgtgggcgtgaccatcctgtggtcggccatcgccacggccatcgtcttcttcatcatcaagctggtgatcggcctgcgggctgcgccggaagccgaagaagacggtctggatatctccgaacacggcgaacgcgcctaccacagctaa

SEQ ID NO: 722 - protein, 510 aa, Caulobacter crescentus
MKLTFKPLAGLMLAATIAGAPLGATAFAQEAAPAPVAAAPAEAAPAPAAAPAEAAPAPAAAPTIEDKMDKGDNAWMLTSALLVLLMILPGLALFYGGLVRAKNMLSVMMQVSTVALIGFVAWMLWGYSFAFTDGGSWDKFVGGLGRVFLNGVTPASNVATFSTGVVIPELTFIAFQSTFAAITAALVVGSLVERMKFAAIVAFAILWPLLSYYPIAHMVWWWPGPNAIALAPEDTVKSGLLWGFGALDFAGGTVVHINAGIAALVGALILGKRQGYGKEPMPPHSLTLTLVGAGLLWVGWFGFNAGSNLESNGYASLAMVNTFIATAGAGLSWILVEWVTRKKPSALGLASGIVAGLVAVTPAAGFAGPMGALILGLVVSPICIIFCSVVKNALKYDDSLDAFGIHGIGGIVGAIGTGLVVNPAWGGAGVVDYTSCGKDGDLSTCDTAVYDMGVQLMAQLKAVGVTILWSAIATAIVFFIIKLVIGLRAAPEAEEDGLDISEHGERAYHS

SEQ ID NO: 723 - DNA, 1167 bp, Archaeoglobus fulgidus
  CDS (1)..(1167)
atgcagagtggagatatatcttggttgctgatttcgacggccctggtcgttctgatgactccagcgctgggattgttttacggtggtatggtgcgagctaagaatgtcctttccacgataacgatgtgctttgtcgcactggcgattgtgagcgtacagtggatactccttggctacactattgcatttggtgacgatgtcagtggtttaactggcaacttagtgttcatcggactcaggaacgttagcatgtccgattacggatttgttgcttttcagatggcgtttgcagcgattacactggccataattgtatcagcacttgcagaaagggtaaagctgtcggcattcctgctgttcggcattctgtggacaaccttcgtttacgacccgatagctcactgggtgtggggaggcggctggctcgctggaataggggcgctggactttgcaggcggaacggtggtgcacataagctcgggtttcagtgctttagctctagcacttcttgtaggcaggagaaccggctacggggaatacaacattgaaccgcacaacattcctatgaccttgctcggtacagcactgctgtggttcggatggttcggtttcaacgctggtagtgcactggaagcgaacgatgtggctttgaacgcattcctagttacgaacacttcggcagcgatgggtgccttaagctggatgtttgcctcctggctaaagggaaaacccggaagtttgggagtggcaagcggtgctatagccgggcttgtggcaattactcctgcagctggctacgttgacccgctttctgcacttgtaataggaggtgttgcaggagtggtgtgctatgcagcgatgctcctcagagtcagagcaggagtagatgagagtcttgatgcctgggctgttcatggcgtcggaggcctgtggggagccattgccaccggcatcttcgcctctgttggtgctaccggcctggtggcagggaatgcacagcaactgctccttcagataattgcggccctagtcgcaacagcctacgccttcctcgtgacgctgatactggcaaaggctgttgatgccgctgtggggctgagggttagctcccaggaggagtacgtcggtctcgacctgtcgcagcatgaggaggttgcctacacgtga

SEQ ID NO: 724 - protein, 388 aa, Archaeoglobus fulgidus
MQSGDISWLLISTALVVLMTPALGLFYGGMVRAKNVLSTITMCFVALAIVSVQWILLGYTIAFGDDVSGLTGNLVFIGLRNVSMSDYGFVAFQMAFAAITLAIIVSALAERVKLSAFLLFGILWTTFVYDPIAHWVWGGGWLAGIGALDFAGGTVVHISSGFSALALALLVGRRTGYGEYNIEPHNIPMTLLGTALLWFGWFGFNAGSALEANDVALNAFLVTNTSAAMGALSWMFASWLKGKPGSLGVASGAIAGLVAITPAAGYVDPLSALVIGGVAGVVCYAAMLLRVRAGVDESLDAWAVHGVGGLWGAIATGIFASVGATGLVAGNAQQLLLQIIAALVATAYAFLVTLILAKAVDAAVGLRVSSQEEYVGLDLSQHEEVAYT

SEQ ID NO: 725 - DNA, 1533 bp, Ureaplasma urealyticum
  CDS (1)..(1533): transl_table=4
atgagaattgtgtcaacaattataactacatcttgaggagtagatccaaatatttacttttcaaagcatgagttaacatgagtgccagcaacagctgatgctaatacattagcattaactaattttaatccgactagcactttattagttgcattagcaattgcctttgtcttattgatgactccaggtttagcattattttatggtgggctaacacgtcgaaaatctacattaacgattattaatcaatgtgtagcttcacttggaatcacaacactgatttgaatttttggagggttctcacttgcttttggaccttctgttggtaaaggaataattggtgatatttcaacttattttgcatttagaaatctattatttgctgatggttgaagtggagatgtaggaattgtttttgcaaactttactaatggtgtaccattaattttattctttgcttatcaattagcttttgcaattattacaccaccattaatggttggtgcatttgcagatcgaatgaaatttaaaaattatctagtattcttagtactatgacaatatttaatttacattccttttgcacattgaatttgaggtcaaggattcttagctgctgctggagtaattgactttgctggtggtattgtaattcatacaactgctggttttggagcattagctgcttcattagtattaggtaaacgtgttttacttaagaatgataaaagtcgtccacacaatattccaatgactattattggagcaacattgttattctttggttgatttggatttaatgttggtggatcaggatttgtagctggtgggaatgctgctacttgatcagctgctacaagtgcttggattaatacaattattgctttagctattggaatggttggttgagcagttcttgaaacaatctttaataaaaatcataaagccacaggtgttggtttagtaacaggtgcaattgctggattagcaacaattactcctgcagcaggttatgttccaatttgagcatctgttcctattggtgtagctgctgtgctagtttgttatactagtgctaaaactttacatcatttccacaaaattgatgatactctagaagtatgaggcgtacatggaatgggtggtgttactggttcattattaattggtgcgtttgcatctaaatctgtaaacccatcaattatgtatgaagcaattggtccaacaacaactggtgttttatttggtgtccaattaggagcggttttattagctgcggtttatggatttgtatttactattttattagtatatattactcgtccaagattatcagcacgccaacaattaggtcatatagactatattaatcatggcgaagatgcatattcattcgatattgaaattccatctgaaaaagaaatggagcaatatgaattagcagatagtacatgacactcaagcacaggtgttaagtattcattgcttaataataaaaaccagcaaaatcataaagtagcaaacgaccattaa

SEQ ID NO: 726 - protein, 510 aa, Ureaplasma urealyticum
MRIVSTIITTSWGVDPNIYFSKHELTWVPATADANTLALTNFNPTSTLLVALAIAFVLLMTPGLALFYGGLTRRKSTLTIINQCVASLGITTLIWIFGGFSLAFGPSVGKGIIGDISTYFAFRNLLFADGWSGDVGIVFANFTNGVPLILFFAYQLAFAIITPPLMVGAFADRMKFKNYLVFLVLWQYLIYIPFAHWIWGQGFLAAAGVIDFAGGIVIHTTAGFGALAASLVLGKRVLLKNDKSRPHNIPMTIIGATLLFFGWFGFNVGGSGFVAGGNAATWSAATSAWINTIIALAIGMVGWAVLETIFNKNHKATGVGLVTGAIAGLATITPAAGYVPIWASVPIGVAAVLVCYTSAKTLHHFHKIDDTLEVWGVHGMGGVTGSLLIGAFASKSVNPSIMYEAIGPTTTGVLFGVQLGAVLLAAVYGFVFTILLVYITRPRLSARQQLGHIDYINHGEDAYSFDIEIPSEKEMEQYELADSTWHSSTGVKYSLLNNKNQQNHKVANDH

SEQ ID NO: 727 - DNA, 1566 bp, Ureaplasma urealyticum
  CDS (1)..(1566): transl_table=4
atgaaaattgtgtcaacttgaggcctaaataaagatatttatttctcaactcatgaattaacatgagtgcccgcagatgcaagtcaatcaacacttaatgcaataggttttaatcctactaatacactactagtagctttagcaattgcttttgttttactaatgacaccagggttagcattattttatggtggtttagtaagacgtaaatcagctttaacaattattaatcaatgtgtagcttcacttggaattacaacattgatttgaatttttggaggtttctcacttgcttttggaccttctgttggtaaaggaataattggtgatatttcaacttattttgcatttagaaatctactatttgctgatggttgaagtggaggagcagttttagtttttgctaattttactaacggcgtaccattaattttattctttgcttatcaattagcttttgcaattattacaccaccattaatggttggtgcatttgcagaccgaatgaaatttaaaaattatctagtattcttagtactatgacaatatttaatttatattccttttgcacattgaatttgaggtcaaggattcttagctgctgctggagtaattgactttgctggtggtattgtaattcatacaactgctggttttggagctttggctgcttcatttatgttaggaaaacgtacaacattaattacagataaaaagcgagctaataatttaccaatggttgtattaggtgcagcattactattttttggttgatttggatttaatgttggtggtgcaggttttgttaaagaaaatacaaatcacatttcacaagctatatcatcatgattaaatacaattattgccttagcaataggtatgataggttgagttacacttgaaactattgttaacaaaaaccacaaaccaacaacagtaggtttagtgactggtgcagtcgctggattagcaacaattactcccgcagcaggttttgttccagtttgagcctctgttcctattgccattatgggtgttttagtatgttattcagtttctagattattagattacttccgttttgatgattctttagaagttctaccagttcatggaatgggtggtgttataggttctttattaattggagcatttgctactaacacggttgcacatggaattaaatatgacgccgtcggattagataataatggaaatccaatttatggtattttatttggactacaattaggtgctgtattattagcagcaacatgggcatttgcctttacatgtttaatagtttatattactaaacctcgtttatcagtgcgtcaacaattaggccatatagactacatcaatcatggtgaagatgcatacaagtttgattttattattccttcagaaagtgaaatgtttgaatatgaaagttttgatcaaacttgagaatgtaaagctagtggttgtaaaaaaagcaacttagctgccaagaaaaaccctgtttttatagagaatgagaatgattgtacatgacaatctaaatctcgtgagtgtacaaaatag

SEQ ID NO: 728 - protein, 521 aa, Ureaplasma urealyticum
MKIVSTWGLNKDIYFSTHELTWVPADASQSTLNAIGFNPTNTLLVALAIAFVLLMTPGLALFYGGLVRRKSALTIINQCVASLGITTLIWIFGGFSLAFGPSVGKGIIGDISTYFAFRNLLFADGWSGGAVLVFANFTNGVPLILFFAYQLAFAIITPPLMVGAFADRMKFKNYLVFLVLWQYLIYIPFAHWIWGQGFLAAAGVIDFAGGIVIHTTAGFGALAASFMLGKRTTLITDKKRANNLPMVVLGAALLFFGWFGFNVGGAGFVKENTNHISQAISSWLNTIIALAIGMIGWVTLETIVNKNHKPTTVGLVTGAVAGLATITPAAGFVPVWASVPIAIMGVLVCYSVSRLLDYFRFDDSLEVLPVHGMGGVIGSLLIGAFATNTVAHGIKYDAVGLDNNGNPIYGILFGLQLGAVLLAATWAFAFTCLIVYITKPRLSVRQQLGHIDYINHGEDAYKFDFIIPSESEMFEYESFDQTWECKASGCKKSNLAAKKNPVFIENENDCTWQSKSRECTK

SEQ ID NO: 729 - DNA, 1530 bp, Sulfolobus solfataricus
  CDS (1)..(1530)
atgaaatcgtggaaattcaaggcactgttaattggccaagtaatattggtaatgcttttattttcaaatattttagcacattctcaaactacaacaaattcatctgcacttcaacaactaaatcaatcagtgcaatcaattcttaacagaacgtctagctatccagctgcagcagtaccatcttggcttgatactggaagtaatgcgtggatgttaactgcagcgacttttgtaggattgcaaagcgttcctggtgttgcgttatattatgctggattgtctaaaaagaaatatgcagtgaactctgcattaatgatattttatgcatttgcggcagtgttagttatatggataatagccggatacagttttggtttcggttatcccgcactggtttccattcacggttatggaatattcggatatcctattcccgcatggggagggctttttgaagcttcacaaaccacctatggtcctagtggtgctcacgctaatataccaaccgctacctttatattcttccaattcgtctttgctgcaataacgccaatattattagccggaggagtattagaaagaatgaactttaaagcttggatggtttttgtacctttctggtctctcctagtgtatagtccagttgcatactggttatttgcaggaggatggttaaatcaattaggtgctgtagacttctctggaggttatgtaatacatgtagatgcaggagtaggagctctagctgcagcgttggctataggtcctagattagcttctgaaagaaaattagaggcgcatagcttacctttagttttagttggagctggcttaatttggttggggtgggatgggttcaatggcggtgatccattaggagctacagtggatgctgcaatcgcagtgctgaatacgaatattgctaccgcagttagtgctgtagtatggatgttgatggatatgaaattctttggaaaaccaacattaattggagctactagtggcgctataactggcctagttgcaattactccagctgcaggttatgtaaacggatgggaagccgcattaattggaatattttctggaagtataccatggatggcattatattggttagagccaaagcttagagttgatgatactttaggtgtgttctctactcacggtatagctggaatagtaggtggtttattaactggagtttttgcaaatcccgcagtcacacagtttgtggctccgggattaacaggagctctctatgggaattggtatcaactaggaattcaagcacttgcagcagtaatagtattcgtatatgacttcgcaataacttttggccttctaaagtttataggattatttataccattacaagcgccacctcaagaactagcaataggagattacgctatgcacggagaggtagcatattcagaattattagctacaattccagaaagcgctaaatctaaggaacagtcagtcgttttacctaagaaagaaaaggaggagaatagtgaagaataa

SEQ ID NO: 730 - protein, 509 aa, Sulfolobus solfataricus
MKSWKFKALLIGQVILVMLLFSNILAHSQTTTNSSALQQLNQSVQSILNRTSSYPAAAVPSWLDTGSNAWMLTAATFVGLQSVPGVALYYAGLSKKKYAVNSALMIFYAFAAVLVIWIIAGYSFGFGYPALVSIHGYGIFGYPIPAWGGLFEASQTTYGPSGAHANIPTATFIFFQFVFAAITPILLAGGVLERMNFKAWMVFVPFWSLLVYSPVAYWLFAGGWLNQLGAVDFSGGYVIHVDAGVGALAAALAIGPRLASERKLEAHSLPLVLVGAGLIWLGWDGFNGGDPLGATVDAAIAVLNTNIATAVSAVVWMLMDMKFFGKPTLIGATSGAITGLVAITPAAGYVNGWEAALIGIFSGSIPWMALYWLEPKLRVDDTLGVFSTHGIAGIVGGLLTGVFANPAVTQFVAPGLTGALYGNWYQLGIQALAAVIVFVYDFAITFGLLKFIGLFIPLQAPPQELAIGDYAMHGEVAYSELLATIPESAKSKEQSVVLPKKEKEENSEE

SEQ ID NO: 731 - DNA, 1272 bp, Aquifex aeolicus
  CDS (1)..(1272)
atgagagcgctaggatttatagggattattctatcaattttttcctcttttgcgtatgcatctgaagccaagttagacactggtaacacagcttggatgctcgtagcttcagcccttgtggtgtttatgacagttcccgggctcgctcttttctatggaggtttagacaaatcaaagagcatcctaaacacgatagcgatgtccttttcagcctttgcggttgtaacactaacgtggatattcgtaggttactcagtagcctacggagacgatatttttggttttataggaaatccattccagtacgtattaggtaagggtataagcgggataaattccgataccggataccctgcacttctggatctgatgttccagctcactttcgcaacaataactaccgctttaatttcgggttccttcgtaggaaggatgaagttttcagcctggatattgtttgcaatactctggagcgtatttgtttatccgcctgtagcccactgggtatggggaggcggatttctggctaacgacggagcccttgactttgcaggaggaacggtagtccacattaacgcgggtatagcgggtttagtaggtgcgttgatcctcggaagaaggaaagacacatctcttattcccaacaacgttccactggtagccctcggtgcgggaatactgtggttcgggtggtttggattcaacgccggttctgctctcggagctaatgagagcgcagcttgggcaatgataaataccacggttgcaacttcaacggcagcactcgcatggatgtttaccgaatggcttcacgtcggtaaacctacagttgtgggaatatcttcaggtatcgttgcaggacttgtcgcaataactcccgcggcaggttttgtaaaccttatcggttcaatttttataggagctatagcatccgtgtgtgcttactttatggttgctcttgtaaaaccaaaattcggatacgacgatgcacttgacgtgttcggaattcacggagtacgcggaatagtgggagcagttttaacgggagtatttgcggatccgaacgtgggaggaactcctggactgctctacggcaatccaaaacaggttcttatacaaatagaaggcgttatcgctactatactctactccgctatcctcacagccgttatactgctggttctgaaagcagtagtaggtctaagagtttccgaagaagaggagctcgaactggacagctccctacacggtgaaaaggcttacaacctataa

SEQ ID NO: 732 - protein, 423 aa, Aquifex aeolicus
MRALGFIGIILSIFSSFAYASEAKLDTGNTAWMLVASALVVFMTVPGLALFYGGLDKSKSILNTIAMSFSAFAVVTLTWIFVGYSVAYGDDIFGFIGNPFQYVLGKGISGINSDTGYPALLDLMFQLTFATITTALISGSFVGRMKFSAWILFAILWSVFVYPPVAHWVWGGGFLANDGALDFAGGTVVHINAGIAGLVGALILGRRKDTSLIPNNVPLVALGAGILWFGWFGFNAGSALGANESAAWAMINTTVATSTAALAWMFTEWLHVGKPTVVGISSGIVAGLVAITPAAGFVNLIGSIFIGAIASVCAYFMVALVKPKFGYDDALDVFGIHGVRGIVGAVLTGVFADPNVGGTPGLLYGNPKQVLIQIEGVIATILYSAILTAVILLVLKAVVGLRVSEEEELELDSSLHGEKAYNL

SEQ ID NO: 733 - DNA, 1434 bp, Mycobacterium tuberculosis
  CDS (1)..(1434)
atggaccaattccccatcatgggcgttccggatggcggcgacaccgcctggatgctggtgagttccgcgctcgtgctgttgatgacgccgggtctggcatttttctacggcggcatggtgcgttccaagagcgtcctgaacatgatcatgatgagcatcagcgcgatgggtgtcgtgacggtgctctgggcgctttacggctactcgattgcgttcggtgatgacgttggcaacatcgccggcaacccgagccaatactggggtctcaaaggtctcatcggcgtcaatgctgttgctgccgatccgagcacgcagaccgccgcggtgaatattccgctggcgggtaccctgccggcgaccgtgtttgtggcattccagctgatgttcgcgatcatcacggttgcgctgatctccggggcggtggccgaccggttgaagttcggcgcctggctgttgttcgccggtttgtgggcgacgttcgtctatttcccggtcgcacactgggtcttcgcatttgacggtttcgccgctgagcacggcggctggatcgccaacaagctgcacgccatcgacttcgccggcggcaccgcggttcatatcaacgccggtgtggcggccttgatgctggcgatcgtgctgggcaaaagacgcggttggccggcgacgctgtttcgaccgcacaatctgccgtttgtgatgctcggggccgccctgctgtggttcggctggtacgggttcaacgcaggatcggcgacgaccgccaacggtgttgccggggcgacgtttgtcaccaccacgattgcgacggccgcggccatgcttggctggctgctcacggagcgcgtccgagatggcaaggctacgacgctgggcgcggcgtcgggcatcgtcgccggactggtcgccatcacgccgtcctgctcgtcggttaatgtcctgggtgccttggcggtaggcgtgtcggccggggtgctgtgcgcgctggcggtggggctgaaattcaaactgggcttcgatgattcgctcgacgtggtcggggtgcacctggttggtggtctggtgggcacactgctggtgggtctgctggcagctccggaggctccggcaattaatggtgtggccggggtatcgaaggggttgttttacggcggaggcttcgcccagctggaacgacaggcgctcggtgcctgcagtgttctcgtctactctggaatcatcaccctgatcttggcattgatcctgaaattcaccatcgggctcaggcttgacgcggagcaagagagcaccggcatcgacgaggctgagcacgcggaaagcggctacgatttcgccgtcgccagcggctcggttctccccccgcgggtcaccgtggaggatagccgcaacggcattcaggagcgtataggccagaaagtggaggcggagccgaaatga

SEQ ID NO: 734 - protein, 477 aa, Mycobacterium tuberculosis
MDQFPIMGVPDGGDTAWMLVSSALVLLMTPGLAFFYGGMVRSKSVLNMIMMSISAMGVVTVLWALYGYSIAFGDDVGNIAGNPSQYWGLKGLIGVNAVAADPSTQTAAVNIPLAGTLPATVFVAFQLMFAIITVALISGAVADRLKFGAWLLFAGLWATFVYFPVAHWVFAFDGFAAEHGGWIANKLHAIDFAGGTAVHINAGVAALMLAIVLGKRRGWPATLFRPHNLPFVMLGAALLWFGWYGFNAGSATTANGVAGATFVTTTIATAAAMLGWLLTERVRDGKATTLGAASGIVAGLVAITPSCSSVNVLGALAVGVSAGVLCALAVGLKFKLGFDDSLDVVGVHLVGGLVGTLLVGLLAAPEAPAINGVAGVSKGLFYGGGFAQLERQALGACSVLVYSGIITLILALILKFTIGLRLDAEQESTGIDEAEHAESGYDFAVASGSVLPPRVTVEDSRNGIQERIGQKVEAEPK

SEQ ID NO: 735 - DNA, 1308 bp, Thermotoga maritima
  CDS (1)..(1308)
atgcgaaagagagttttttccttgttgctagttcttgcttttctttctgtgggtttcgcccaggacggtgtcacagatgtcggctggtcactcgacatggtctggatcctcatttccgcagcgctggtcttcttcatgcaagcgggttttgccatggtagagtccggtttcacccgcgcaaagaacacggtgaatgtgctcatgaaaaacctcatggattttgcgatcggatctgtggtcttcttcatcttcggctactggatcatgttcgggaaacatcctctcacctttgatccctccacaaaagaaggtctctgggattttgccatgtggatgtttcagatggctttcgcaggtacggccgcgacgattgtgtccggagcgatggcagagcgcactaagtttcccgcgtacctcgcttacacaggtttcataacaggaatcatctattcggttgttggaaggtggatctggggaggaggatggcttgcacagaaaggttttatcgattttgcaggttccacagttgttcattctgttggtggatgggctgccatgataggtgcatcccttcttggtcccaggtttggaaagtacgacagtcaaggtaatcccaagcctattccagggcacaacattcctcttgctgctctcggaaccttcatcctatggtttggatggttcgggttcaatggaggaagcactcttgccggaacgaacggtgcgatagggatgatcatattgaacaccaacctcgctgctgccactggagcactcgctgcaatggtcaccgtatgggcaaaatatggaaagccggatgcgagtatgacgatgaacggtgctcttgctggccttgttgccatcaccgcaccgtgtgctgtggtgtctcctgtgagttctttgatcataggagcgatcggaggggtgatcgtagtgtttgcggttgagttcttcgacaaagttttgaaaatcgacgatcccgttggggccatatccgttcatggtgtcaacggtgcttgggggactctcgccgtgggactctttgcggagagcaagtacgctcttgcaagcgggatgggggatgtgaacggactcttcttcggaggaggagtgcatcaacttggagttcagtttctgggggtggtcagtgtgtttgcctggacggtagtgaccagtttccttgttttctggttcatcaaaaagacaattggtttgagggtagacagagacatagagttgaaggggctggatatagaggagcacggcatggaaggatacgctgattttgaaatcttcaccacaagatga

SEQ ID NO: 736 - protein, 435 aa, Thermotoga maritima
MRKRVFSLLLVLAFLSVGFAQDGVTDVGWSLDMVWILISAALVFFMQAGFAMVESGFTRAKNTVNVLMKNLMDFAIGSVVFFIFGYWIMFGKHPLTFDPSTKEGLWDFAMWMFQMAFAGTAATIVSGAMAERTKFPAYLAYTGFITGIIYSVVGRWIWGGGWLAQKGFIDFAGSTVVHSVGGWAAMIGASLLGPRFGKYDSQGNPKPIPGHNIPLAALGTFILWFGWFGFNGGSTLAGTNGAIGMIILNTNLAAATGALAAMVTVWAKYGKPDASMTMNGALAGLVAITAPCAVVSPVSSLIIGAIGGVIVVFAVEFFDKVLKIDDPVGAISVHGVNGAWGTLAVGLFAESKYALASGMGDVNGLFFGGGVHQLGVQFLGVVSVFAWTVVTSFLVFWFIKKTIGLRVDRDIELKGLDIEEHGMEGYADFEIFTTR

SEQ ID NO: 737 - DNA, 1242 bp, Lactococcus lactis
  Lactococcus lactis subsp. lactis
  CDS (1)..(1242)
atggacacaggctcaattgcatttattttaatttgtgcggcattggtttttttgatgacgcctgcactagcatttttttatggagggcttggacgccgaaaaaatgtgttaaacacaatgatgatgtctctcgcaccaatggctctggcttctattttatggataattattggcttctcattttcattttcaggaagcaatagttggattggtgatttccaccatttgtttatgaatggtgtggatatggctaaaaattcacttttccctgctaatcatattccagatggccttttttctggttttcaaatgatgttctcgattatcacagtagctctaattacgggatctgttgttggaagaatgagatttacaccaattttgatttttatgactgcttggttaattttagtttattatcctttggctcatatggtttggggcggtggatttttggctcaaattcatgcgattgactttgcgggtggagatgttgttcatatttcaagtggggttacaggacttggacttgcgttagtacttggaaaacgtcgagattacgaacgtttagattatcgtccacataatattccttttgttgttttgggcgctggtctcctatggtttggttggttcggctttaatgctgggtcagcgcttgctgccaatggtgtggcaattaacgcttttatgacgactaatacagcggcagcagcagcaatgttttcatggatgattgttgaaaaaatattgattggtaaaccttcaattgttggtgcttgttctggtgcggtagttggtttggtggccatcactccaggcgctggttttgtttctttatggtcgtcattgattattggtcttttggtcagtcctttgtcatactttatgatttctgtagtaaaaaagaaattgggatatgatgatgctttagatgcttttggttgtcacggtattggcgggatgtttggcggaattatgacaggaatttttgcaacgccggctttggcaccagaaaaaggctacgctggtttaatctatggctctgggaaattacttttggctaatgtgtctgcggttgtcttcacagttattttcactgctcttgtgagttggatcattattaaagtaattgccttgtttatgccaattcgtgtatctgaccgtgctgaagctattggacttgacgacagtgagcacgaagaaactgcttatccaaccttcttaggtttggattcttaa

SEQ ID NO: 738 - protein, 413 aa, Lactococcus lactis
  Lactococcus lactis subsp. lactis
MDTGSIAFILICAALVFLMTPALAFFYGGLGRRKNVLNTMMMSLAPMALASILWIIIGFSFSFSGSNSWIGDFHHLFMNGVDMAKNSLFPANHIPDGLFSGFQMMFSIITVALITGSVVGRMRFTPILIFMTAWLILVYYPLAHMVWGGGFLAQIHAIDFAGGDVVHISSGVTGLGLALVLGKRRDYERLDYRPHNIPFVVLGAGLLWFGWFGFNAGSALAANGVAINAFMTTNTAAAAAMFSWMIVEKILIGKPSIVGACSGAVVGLVAITPGAGFVSLWSSLIIGLLVSPLSYFMISVVKKKLGYDDALDAFGCHGIGGMFGGIMTGIFATPALAPEKGYAGLIYGSGKLLLANVSAVVFTVIFTALVSWIIIKVIALFMPIRVSDRAEAIGLDDSEHEETAYPTFLGLDS

SEQ ID NO: 739 - DNA, 1218 bp, Clostridium acetobutylicum
  CDS (1)..(1218)
atgaatttcgcagatactacttttgtatttctttctacagtcttagtaatgataatgacacctgctcttgcaatgttttacggaggtatggttaaaaccaagaacactttaggtactatgatgcacagttatgcctgtatgattatagtatcccttcaatggattttaataggatattctattgcatttggccctgatatttcaggccttataggaaatttccaatatgcacttttacatcatgtaggttttaaaccttttgcaccatattcaagcactattcctcatagcctatttatgatgttccaattaatgttcgcaattataactccaggattaattacaggtgcttttgctgaaagaataaaatttcccgcatttatactttttatacttctttggacaactataatatacgatccacttgcacactgggtatggggtaacggtggctggattaaaaatttaggtgctttagactttgctggaggaactgtagttcatataagttccggagcctctggtcttgttgctgcaataatgattggaaagagaaaatatataaaaacctctccaaacaatcttactttaacctttataggtggtacgcttttatggtttggttggtttggtttcaacgcaggaagtgccttagctataaacgatgtagctatgaatgcctttataactacaaataccgctgctgctgcggctgctgctgcttggattacctgtgaatggtttattacaaaacgtccaacggttttaggtgccctaacaggtactttagctggtctcgtttctataacacctgcctgcggttttgtaacagttggctcttcattagttataggtattattggcggaattatatgcttcttctcagttagcttccttaaaaagaaatttaactatgacgatgcattagatgcctttggctgtcatggtattggtggtacctggggtgctatagcaaccggaatatttgctacaaaagctgttaattcagctggtgcaaatggacttctttatggcaatgcttctcttgttttgaaacaacttgaagcaactgctgctacctatgcttattctataattgggacaataataattattaaagtggtgtctctaatattcaaaatacgttctactgacgaagaagaacttcaaggccttgatatctctatacatggagaaagagcttatcacatagattaa

SEQ ID NO: 740 - protein, 405 aa, Clostridium acetobutylicum
MNFADTTFVFLSTVLVMIMTPALAMFYGGMVKTKNTLGTMMHSYACMIIVSLQWILIGYSIAFGPDISGLIGNFQYALLHHVGFKPFAPYSSTIPHSLFMMFQLMFAIITPGLITGAFAERIKFPAFILFILLWTTIIYDPLAHWVWGNGGWIKNLGALDFAGGTVVHISSGASGLVAAIMIGKRKYIKTSPNNLTLTFIGGTLLWFGWFGFNAGSALAINDVAMNAFITTNTAAAAAAAAWITCEWFITKRPTVLGALTGTLAGLVSITPACGFVTVGSSLVIGIIGGIICFFSVSFLKKKFNYDDALDAFGCHGIGGTWGAIATGIFATKAVNSAGANGLLYGNASLVLKQLEATAATYAYSIIGTIIIIKVVSLIFKIRSTDEEELQGLDISIHGERAYHID

SEQ ID NO: 741 - DNA, 1350 bp, Agrobacterium tumefaciens
  CDS (1)..(1350)
atgcaactcaacaagtttttgacgctcggcaagctgggcgccgcagcaacggccctgatggccccggccatcgcctttgcccaggatgcagcgccagcagtagcggcagcggctcctgttccggaaaaagccgataccgccttcatgtatatcgcaacgatcctcgtgctgttcatgatcattcctggtctggcgctgttttacggcggtctggtccgcaccaagaacatgctctccgttctcatgcagtgcacggtcatcggcgcagtcatgatgctggtgtgggtcatctacggttactccttcgccttcggcggcggcaccggtccttatttcggcggcttcggcaagctgttcctgtcgggcgtttcgcttgacagcacgtctgccaccttctcgcagggtgtcgtgatctacgaatacaccttcatcgccttccagatgacttttgcggccatcacgccggcgctgatcatcggtgcttttgcagaacgcgtgaagttctccgccgttatccttttcaccatcctctgggccaccttcgtttatttcccgatcgcgcacatggtctgggacgcgaacggcctgatcttcggcatgggcgctctcgacttcgccggcggcaccgtcgttcacatcaatgccggtatcgctggcctgatcggcgctatcatggttggcaaacgcaccggcttcggcaaggacatgatggctccccactccatgacgctgacgctggttggcgccgccatgctgtggttcggctggttcggctttaacgccggctccaacctcgaggcatcgggcggtgcggttctcgcaaccatgaacaccttcctcgccactgctgcggccatcgtttcctggtcgctggttgagagcttcacccgcggcaaggcttccatgctgggtgctgcttcgggcatgatcgccggcctcgttgccgtcacgcctgctgccggctccgtcggcccgatgggtgcgatcgttctcggtctcatcgtttcgccgatctgctacttcttcgtctccgtggtgaagaacaagttcggttatgacgatactgccgacgtcttcggcgtccacggcatcggtggcatcattggcgccctcggcaccggcatcttcacctcgccgctgcttggcggcaccggcaaggccgatttctccatctcctcgcagctctggacccagttcgttgccgtcgccatcaccatcgtctggtgcgcggtcgtttcggctatcctctacaagatcgtcgacgtgatcgttggtcttcgggttccggtcgaagccgaacgcgaaggtctcgacctcgcgacccacggcgaagccgcttaccactcctga

SEQ ID NO: 742 - protein, 449 aa, Agrobacterium tumefaciens
MQLNKFLTLGKLGAAATALMAPAIAFAQDAAPAVAAAAPVPEKADTAFMYIATILVLFMIIPGLALFYGGLVRTKNMLSVLMQCTVIGAVMMLVWVIYGYSFAFGGGTGPYFGGFGKLFLSGVSLDSTSATFSQGVVIYEYTFIAFQMTFAAITPALIIGAFAERVKFSAVILFTILWATFVYFPIAHMVWDANGLIFGMGALDFAGGTVVHINAGIAGLIGAIMVGKRTGFGKDMMAPHSMTLTLVGAAMLWFGWFGFNAGSNLEASGGAVLATMNTFLATAAAIVSWSLVESFTRGKASMLGAASGMIAGLVAVTPAAGSVGPMGAIVLGLIVSPICYFFVSVVKNKFGYDDTADVFGVHGIGGIIGALGTGIFTSPLLGGTGKADFSISSQLWTQFVAVAITIVWCAVVSAILYKIVDVIVGLRVPVEAEREGLDLATHGEAAYHS

SEQ ID NO: 743 - DNA, 1479 bp, Saccharomyces cerevisiae
  CDS (1)..(1479)
atggagagtcgaactacagggcctttaacgactgaaacctacgatggccccactgtggccttcatgatattaggtgccgccctagtattttttatggtgcccggattgggattcttgtactccggattggcaagaaggaagtctgcactagcactaatctgggttgtattaatggcgactttggtcggtatactgcaatggtatttctggggttactctctagctttttcaaagtccgctccgaataataaattcattgggaatctagattcgtttggctttagaaacgtgtacggaaaaaaattcgatgaagatgcctaccctgagctcgcgtatgcaaccttccaaatgatgttttcgtgcgtcaacttaagtattatcgctggcgccactgccgaaagaggcaggctgctaccgcacatggtttttctctttattctagctaccattggatattgtccagtgacgtattggatttggtcaccaggtggttgggcataccaatggggagtcctcgattgggcaggcggcggcaacattgaaatattaagcgctgtttccgggtttgtttactcttggtttttgggcaaaagaaatgaaaagttactgataaatttcaggcctcataatgtttcattggtcactctaggcacatccatactgtggtttggctggctgctatttaattctgcatcctcattatccccaaatttgaggtcagtttatgcattcatgaatacatgtctcagtgccattactggtgggatgacgtggtgtcttctggattacagatcggagaagaaatggtcgacagttggtctgtgctccggtatcatttctgggctggtggctgcaacgccaagctcaggctgtataaccctttacggttcacttattcaaggcattgtggcgggggtagtgtgtaactttgcgacgaagttgaaatactacgctaaagtagatgatgccatggacattctagctgagcacggggttgcaggcgtaataggactaattttcaatgccctttttggagcagactgggtcattggtatggatggcactacagagcacgagggcggctgggtaactcacaattacaagcaaatgtataagcagatcgcttacattgccgcatccattgggtacactgctgctgtaactgcaataatctgctttgtgctcggctacatacccggtatgaggctaagaatatcagaagaggcagaggaggcgggtatggacgaagatcaaattggcgaatttgcgtacgattatgtggaagtgagaagagattactatctatggggtgtagacgaagattcacaacgctctgatgtaaatcaccgggtgaacaacgctcatttggccgctgaacgtagcagtagcggtactaatagttcctcggatgggaatggagaaatgattcaatccgaaaagatcctaccaattcatcaagaagatcctgccaataggtaa

SEQ ID NO: 744 - protein, 492 aa, Saccharomyces cerevisiae
MESRTTGPLTTETYDGPTVAFMILGAALVFFMVPGLGFLYSGLARRKSALALIWVVLMATLVGILQWYFWGYSLAFSKSAPNNKFIGNLDSFGFRNVYGKKFDEDAYPELAYATFQMMFSCVNLSIIAGATAERGRLLPHMVFLFILATIGYCPVTYWIWSPGGWAYQWGVLDWAGGGNIEILSAVSGFVYSWFLGKRNEKLLINFRPHNVSLVTLGTSILWFGWLLFNSASSLSPNLRSVYAFMNTCLSAITGGMTWCLLDYRSEKKWSTVGLCSGIISGLVAATPSSGCITLYGSLIQGIVAGVVCNFATKLKYYAKVDDAMDILAEHGVAGVIGLIFNALFGADWVIGMDGTTEHEGGWVTHNYKQMYKQIAYIAASIGYTAAVTAIICFVLGYIPGMRLRISEEAEEAGMDEDQIGEFAYDYVEVRRDYYLWGVDEDSQRSDVNHRVNNAHLAAERSSSGTNSSSDGNGEMIQSEKILPIHQEDPANR

SEQ ID NO: 745 - DNA, 1500 bp, Saccharomyces cerevisiae
  CDS (1)..(1500)
atgtcttacaattttacaggtacgcctacaggcgaaggaacgggtggtaactcgttgacaacagatttgaatacacaatttgacttggccaacatgggatggatcggtgtggcttcagcaggtgtgtggattatggtcccaggtatcggtttattatattctggtttatccaggaaaaagcatgctttatccttgctttgggcctcgatgatggcttccgccgtgtgtattttccaatggtttttctggggatactcattagctttctcacacaacactagaggtaacggttttattggtaccttggaattctttgggtttcgtaacgttttaggagccccatctagtgtcagttctcttcccgatatactgtttgccgtttaccaaggtatgtttgccgcagtcaccggtgccctaatgctaggtggtgcctgcgagagggcaaggttgtttcctatgatggtgttcttgtttttatggatgactattgtttattgtcctattgcatgctgggtctggaatgccgagggttggttggtcaaattgggtagcttggactatgcaggtggtttatgtgtccatttaacatctggacatggtggtctagtttacgctttgatactgggtaagcgtaatgaccctgttacacgtaaagggatgcccaagtacaaaccacattccgtcacctcggtggttttaggcacagtgttcttatggtttggttggatgttctttaacggaggctctgcaggtaatgcaactatacgagcatggtactctattatgtccacaaacttagctgctgcttgcggtggcttgacatggatggttatcgattatttcagatgcggaagaaagtggactacagttggtttgtgttcaggtatcatcgctggcctagtgggtatcaccccagccgccgggttcgtgccaatctggtcagccgttgtcattggtgtggttactggtgcaggatgtaaccttgctgttgacttaaagagtctattgcgcatcgatgatggtctagattgttactctatccatggtgtgggtggttgtattggttctgtattaactggtatctttgctgcagactatgtaaatgccactgcaggctcttacattagtccaattgatggtggctggatcaatcatcactataaacaagttggttatcaattagcaggtatatgcgctgcactagcctggactgttactgtcacatctatcttgcttctaactatgaatgccattccatttttaaaactaagattaagtgctgatgaggaagaattaggtaccgacgctgctcaaattggtgaatttacatacgaggaatccactgcttacatcccagaaccaatcagatctaaaacatcggcacaaatgccacctcctcatgaaaacattgatgataagattgtgggtaacacagacgcagaaaagaattctacgccttccgacgcttcttctactaagaacactgaccatatagtataa

SEQ ID NO: 746 - protein, 499 aa, Saccharomyces cerevisiae
MSYNFTGTPTGEGTGGNSLTTDLNTQFDLANMGWIGVASAGVWIMVPGIGLLYSGLSRKKHALSLLWASMMASAVCIFQWFFWGYSLAFSHNTRGNGFIGTLEFFGFRNVLGAPSSVSSLPDILFAVYQGMFAAVTGALMLGGACERARLFPMMVFLFLWMTIVYCPIACWVWNAEGWLVKLGSLDYAGGLCVHLTSGHGGLVYALILGKRNDPVTRKGMPKYKPHSVTSVVLGTVFLWFGWMFFNGGSAGNATIRAWYSIMSTNLAAACGGLTWMVIDYFRCGRKWTTVGLCSGIIAGLVGITPAAGFVPIWSAVVIGVVTGAGCNLAVDLKSLLRIDDGLDCYSIHGVGGCIGSVLTGIFAADYVNATAGSYISPIDGGWINHHYKQVGYQLAGICAALAWTVTVTSILLLTMNAIPFLKLRLSADEEELGTDAAQIGEFTYEESTAYIPEPIRSKTSAQMPPPHENIDDKIVGNTDAEKNSTPSDASSTKNTDHIV

SEQ ID NO: 747 - DNA, 1524 bp, Synechocystis sp.
  CDS (1)..(1524)
atgtctaattcgatattgtctaaactaaatgtgggtgagaggagtcctgttaatcggacacattcctcgcgtacggaggcagaaaagtcatccctttttcgctttgtacgccgtaaaattaattctccctggttggcctgtgttcccttaacagccctgattgtggcaatctggaacgccgcggcgatcgcccaagacacagaaattgtcaacatcaccgttgaaaccgttaacgaaaatgttgccactctccagggaacccttaatgccatctggattttgatagccgccattctggttatcttcatgaacgctggtttcgggatgttggaaaccggcctttgccggcaaaaaaatgccgttaacatcctgaccaaaaacctgatcgttttcgccttggccaccatagcttactgggcgatcggtttttccttgatgttcggcagcagtggcaatcccttcgtcggtttcgggggatttttcctgagcggcgaccacaccaactatggattaagcccatttccagaaggattgcccgtagcagtattcttcttgttccaggttgcgttctctgctaccgccgccaccattgtttccggtgctgtagctgagcggatcaagtttaatgagtttttgatcttcagtgttctgttggttggtattgcctatcccatcactggtcactgggtttgggatgccggcggctggctttacaccatgggctttatggactttgccggttccactgtggttcactccgttggtggttgggctgctttggctggagctttccttctcggtccccgcttaggtaaatttgttgatggccgacccggcgctatccccggccacaacatgggttttgccatgcttggttgtctaattctctggatcggctggttcggttttaaccccggttcccaattagccgccgatcaagcctgtgcctacattgccgttaccactaaccttgctgcctctgctggtggtctcaccgctacttttacctcctggctcaaagatggtaagcctgatttgaccatggtaatcaacggtgtactggctggactggtgggtattaccgctggttgtgctggagtatcctactgggggtctgtcatcattggtggtatcgctggaattttggtggtctactccgttgccttcttcgacaaaattaaaattgatgaccccgtgggtgccatttctgttcacttggtcaacggtgtttggggaaccctggcagtgggcttcttcaacatggagaagggcttgttttacggcggcggcatcaaccagttaatcattcaaatcgttggtattctggcgatcggtgctttcaccgctatcttcagcttcgttgtttgggctatcctcaagcaaactatgggcatccgggtgtccggcgaagaagaaatgatcggtttggacatcggcgagcatggcatggaagcttacactggctttgttaaggaaactgattcctttggtagtgctgtctccggtgccactgtccctgaataa

SEQ ID NO: 748 - protein, 507 aa, Synechocystis sp.
MSNSILSKLNVGERSPVNRTHSSRTEAEKSSLFRFVRRKINSPWLACVPLTALIVAIWNAAAIAQDTEIVNITVETVNENVATLQGTLNAIWILIAAILVIFMNAGFGMLETGLCRQKNAVNILTKNLIVFALATIAYWAIGFSLMFGSSGNPFVGFGGFFLSGDHTNYGLSPFPEGLPVAVFFLFQVAFSATAATIVSGAVAERIKFNEFLIFSVLLVGIAYPITGHWVWDAGGWLYTMGFMDFAGSTVVHSVGGWAALAGAFLLGPRLGKFVDGRPGAIPGHNMGFAMLGCLILWIGWFGFNPGSQLAADQACAYIAVTTNLAASAGGLTATFTSWLKDGKPDLTMVINGVLAGLVGITAGCAGVSYWGSVIIGGIAGILVVYSVAFFDKIKIDDPVGAISVHLVNGVWGTLAVGFFNMEKGLFYGGGINQLIIQIVGILAIGAFTAIFSFVVWAILKQTMGIRVSGEEEMIGLDIGEHGMEAYTGFVKETDSFGSAVSGATVPE

SEQ ID NO: 749 - DNA, 1602 bp, Oryza sativa
  Oryza sativa (rice)
  CDS (1)..(1602)
atggcgacgtgcgcggcggacctggcgccgctgctggggccggtggcggcgaacgcgacggactacctgtgcaaccggttcgccgacacgacgtcggcggtggacgcgacgtacctgctcttctcggcgtacctcgtgttcgccatgcagctcgggttcgcgatgctctgcgccgggtcggtgcgggccaagaacacgatgaacatcatgctcaccaacgtgctcgacgccgcggccggggcgctcttctactacctcttcggcttcgcttcgcttcgcgattgccttcgcacgccgtccaacggcttcatcgggaagcagttcttcggcctcaagcacatgccggcaagaccgggttccgactacgacttcttcctcttccagtgggccttcgccatcgccgccgccgggatcacgtcgggctccatcgccgagaggacgcagttcgtcgcctacctcatctactccgccttcctcaccgggttcgtctacccggtggtgtcccactggatctggtccgccgatgggtgggcctctgcctcccgcacgtccggacctctgctgttcggctccggtgtcatcgacttcgccggctccggcgtcgtccacatggtcggcggtgtcgccgggctctggggcgcgctcatcgagggcccccgcatcggcaggttcgaccacgccggccgatcggtggcgctcaagggccacagcgcgtcgctcgtcgtgcttggcaccttcctgctgtggttcggctggtacggattcaaccccgggtcgttcaccaccatcctcaagacgtacggcccggccggcggcatcaacgggcagtggtccggagtcggccgcaccgccgtgacgacgaccctggccggcagcgtggcggcgctcaccacgctgttcgggaagcggctccagacggggcactggaacgttgtcgacgtctgcaacggcctcctcggcgggttcgccgccatcaccgccgggtgcggcgtcgtcgacccgtgggccgcgatcatctgcgggttcgtctcggcgtgggtgctcatcggcctcaacctcgccgcgcgcctcaagttcgacgacccgctcgaggcggcccagctccacggcgggtgcggcgcgtgggggatcctcttcaccgcgctcttcgcgaggcagaagtacgtcgagagatctacggcgccggccgcgtacggcctgttcatgggacgccgcaagctgctcgttggcgctgtcatccagatcctggtcatcttcgggtgggtcagctgcaccatgggacctctcttctacgggctcaagaagctcggcctgctccgcatctccggccgagacgagacgtccggcatggacctgacacggcacggcgggttcgcgtacgtctaccacgacgaggacgagcacgacaagtctggggttggtgggttcatgctccggtccgcgcagacccgcgtcgagccggcggcggccggctgcctccaacagcaacaaccaagtgtaaccaatccagaagcaagcacgtcacagcgaaggaagaaatcacgggtttctctccctctccgatctcgatcgtcacgtcataaatttgatccccatatttga

SEQ ID NO: 750 - protein, 533 aa, Oryza sativa
  Oryza sativa (rice)
MATCAADLAPLLGPVAANATDYLCNRFADTTSAVDATYLLFSAYLVFAMQLGFAMLCAGSVRAKNTMNIMLTNVLDAAAGALFYYLFGFASLRDCLRTPSNGFIGKQFFGLKHMPARPGSDYDFFLFQWAFAIAAAGITSGSIAERTQFVAYLIYSAFLTGFVYPVVSHWIWSADGWASASRTSGPLLFGSGVIDFAGSGVVHMVGGVAGLWGALIEGPRIGRFDHAGRSVALKGHSASLVVLGTFLLWFGWYGFNPGSFTTILKTYGPAGGINGQWSGVGRTAVTTTLAGSVAALTTLFGKRLQTGHWNVVDVCNGLLGGFAAITAGCGVVDPWAAIICGFVSAWVLIGLNLAARLKFDDPLEAAQLHGGCGAWGILFTALFARQKYVERSTAPAAYGLFMGRRKLLVGAVIQILVIFGWVSCTMGPLFYGLKKLGLLRISGRDETSGMDLTRHGGFAYVYHDEDEHDKSGVGGFMLRSAQTRVEPAAAGCLQQQQPSVTNPEASTSQRRKKSRVSLPLRSRSSRHKFDPHI

SEQ ID NO: 751 - DNA, 1515 bp, Arabidopsis thaliana
  Arabidopsis thaliana (mouse-ear cress)
  CDS (1)..(1515)
atggcgtcggctctctcttgctctgcctctgatctgattccattactatcaggtggagccaacgccaccgcagcagcagccgccgctgaatacatctgcgggagattcgacacagtcgccgggaaattcactgatgcggcttacgcaatcgacaacacttaccttctcttctctgcttacctcgttttcgcgatgcagctcggtttcgccatgctctgtgccggatccgtacgtgcaaaaaacacgatgaacattatgctcacgaacgtcatcgacgctgcagccggaggtctcttctattatctcttcggtttcgcttttgcttttggatctccttctaatggattcatcggaaaacatttctttggaatgtatgattttcctcaacctacgtttgattatccttattttctatatcaatggactttcgctatcgccgccgctggaatcacgagtggttcgatagcggagaggactcagttcgttgcgtatttgatctattcttctttcttgacgggtcttgtttacccgattgtgtcgcattggttttggtcttctgatggttgggcgtctccggctagatctgagaaccttctgtttcaatcaggtgtgattgatttcgctggctctggtgttgttcatatggttggtggtattgctggtttatggggagctttaattgaaggacctaggattggtcggtttggagttgggggtaaaccggttacgttgcgtggtcatagtgctacgttggttgttcttggaacgtttttgttatggttcggatggtacgggtttaacccgggctcgtttgcaactatttttaaggcgtatggggagactccagggagctcgttttacggacaatggagcgcagttgggagaaccgcggtaacaactacgttagctggttgcacggcggcgttaacgactctgtttgggaaaagacttattgatgggtattggaatgtaactgatgtttgcaatggtttgttaggcgggtttgcggctataactagcggatgttcggttgtggaaccgtgggctgcgcttgtatgtgggtttgtagccgcatgggtgctgatgggatgcaatagactagcggaaaagctccaatttgatgatccgttggaagcggctcagcttcacggtggttgtggtgcgtgggggattattttcaccgggttgttcgcggagaaaagatacattgccgagatctttggaggcgacccgaataggcctttcggattgctaatgggaggaggaggtaggttgcttgcggcgcacgtcgttcagattttggtgattacgggttgggttagtgtgacaatggggactctgttttttattttgcataagctgaaactgttgaggataccggcggaggatgagatagctggggtggatccgacgagtcacggagggttggcttatatgtacacagaagatgagattaggaatgggatcatggttaggagagtgggtggtgataatgatcccaatgtaggtgtttga

SEQ ID NO: 752 - protein, 504 aa, Arabidopsis thaliana
  Arabidopsis thaliana (mouse-ear cress)
MASALSCSASDLIPLLSGGANATAAAAAAEYICGRFDTVAGKFTDAAYAIDNTYLLFSAYLVFAMQLGFAMLCAGSVRAKNTMNIMLTNVIDAAAGGLFYYLFGFAFAFGSPSNGFIGKHFFGMYDFPQPTFDYPYFLYQWTFAIAAAGITSGSIAERTQFVAYLIYSSFLTGLVYPIVSHWFWSSDGWASPARSENLLFQSGVIDFAGSGVVHMVGGIAGLWGALIEGPRIGRFGVGGKPVTLRGHSATLVVLGTFLLWFGWYGFNPGSFATIFKAYGETPGSSFYGQWSAVGRTAVTTTLAGCTAALTTLFGKRLIDGYWNVTDVCNGLLGGFAAITSGCSVVEPWAALVCGFVAAWVLMGCNRLAEKLQFDDPLEAAQLHGGCGAWGIIFTGLFAEKRYIAEIFGGDPNRPFGLLMGGGGRLLAAHVVQILVITGWVSVTMGTLFFILHKLKLLRIPAEDEIAGVDPTSHGGLAYMYTEDEIRNGIMVRRVGGDNDPNVGV

SEQ ID NO: 753 - DNA, 1545 bp, Lycopersicon esculentum
  Lycopersicon esculentum (tomato)
  CDS (1)..(1545)
atggcctccgccatgacttgctcagctgccgagctcttccctcatctcggcagctcagcaaatgccacagcggccgcagaattcatctgcagccgcttctcagctgtctcagagtacctcacaaacaccacctacgcggtggacaccacatacctcctcttctcggcttacctcgtcttcgccatgcaattgggatttgccatgttgtgcgcgggctctgtccgcgccaaaaacacgatgaatataatgcttacaaacgtgcttgatgctgctgctggtggattttcttattatctctttggttttgcctttgcctttggagctccttctaatggtttcattggaaaacatttttttggattaaaagagtttccttcacaagcttttgactatagctattttctttatcaatgggcctttgcaatagctgcagcaggtatcacaagtgggtccatagctgaaagaacacaatttgtggcttatctcatttactcttcatttttgactggttttgtgtacccaattgtctcacattggttctggtccggtgatggttgggccagtgcatcaaaaaccgatggtaacttattattgcggttcggtgttatcgattttgccgggtccggtgttgttcatatggttggtggcattgccggtctatggggcgctttcatcgaaggaccacgaatcggtcggtttgatcggtccggtcggtctgttgccctaagaggccatagtgcctcattagttgtattaggtacttttttactatggttcggttggtacggatttaatcctggttcattcttaactattcttaaatcatacgatcataccataagaggtacttattatggtcagtggagcgcgatcggtagaacagctgtcacgactacattggctggttgtaccgccgctctgacaactttgttttgtaagaggcttttagtggcacattggaatgtagttgatgtatgtaacggtttactaggtggatttgcagcaatcacgtcaggttgtgcagttgttgagccatgggcagctatagtttgtggatttatcgcagcttgggttttaattggatttaacgcattggcagctaaattaaaatacgacgatccattagaagcagcacaacttcatggtggttgcggttcatgggggataatatttactggattattcgcgaaaaaagaatatgtcaacgaagtatatccaggatttcctaatagaccatatggattgtttatgggaggtggtggaaaactattaggtgcacaagtaattcaagttgttgtgattattggatgggtgagtgtcacaatgggaccattgttttatttgttacataagtttaagctattgaggatatcgcgagacgatgaaacagcagggatggatttaacaagacatggaggatttgcatatatatatcatgatgaagatgaaggttcatctatgcctggatttaaaatgacaagagttgaaccgactaatacttctacaccagatcatcaaaatagatctgttaatgtggttgtataa

SEQ ID NO: 754 - protein, 514 aa, Lycopersicon esculentum
  Lycopersicon esculentum (tomato)
MASAMTCSAAELFPHLGSSANATAAAEFICSRFSAVSEYLTNTTYAVDTTYLLFSAYLVFAMQLGFAMLCAGSVRAKNTMNIMLTNVLDAAAGGFSYYLFGFAFAFGAPSNGFIGKHFFGLKEFPSQAFDYSYFLYQWAFAIAAAGITSGSIAERTQFVAYLIYSSFLTGFVYPIVSHWFWSGDGWASASKTDGNLLLRFGVIDFAGSGVVHMVGGIAGLWGAFIEGPRIGRFDRSGRSVALRGHSASLVVLGTFLLWFGWYGFNPGSFLTILKSYDHTIRGTYYGQWSAIGRTAVTTTLAGCTAALTTLFCKRLLVAHWNVVDVCNGLLGGFAAITSGCAVVEPWAAIVCGFIAAWVLIGFNALAAKLKYDDPLEAAQLHGGCGSWGIIFTGLFAKKEYVNEVYPGFPNRPYGLFMGGGGKLLGAQVIQVVVIIGWVSVTMGPLFYLLHKFKLLRISRDDETAGMDLTRHGGFAYIYHDEDEGSSMPGFKMTRVEPTNTSTPDHQNRSVNVVV

SEQ ID NO: 755 - DNA, 1506 bp, Arabidopsis thaliana
  Arabidopsis thaliana (mouse-ear cress)
  CDS (1)..(1506)
atgtcttgctcggccaccgatctcgctgtcctgttgggtcctaatgccacggcggcggccaactacatctgtggccagttaggcgacgtcaacaacaaatttatcgacaccgctttcgctatagacaacacttaccttctcttctccgcctaccttgtcttctctatgcagcttggcttcgctatgctctgtgccggttccgtgagagccaagaatactatgaacatcatgcttaccaacgtccttgacgctgcagccggtggtctcttctattatctgtttggctacgcctttgcctttggatctccgtccaatggtttcatcggtaaacactactttggtctcaaagacatccccacggcctctgctgactactccaactttctctaccaatgggcctttgcaatcgctgcggctggaatcacaagtggctcgatcgctgaacggacacagttcgtggcttacctaatctattcctctttcttaaccgggtttgtttacccggtcgtctctcactggttctggtcagttgatggatgggccagcccgttccgtaccgatggagatttgcttttcagcaccggagcgatagatttcgctgggtccggtgttgttcatatggtcggaggtatcgctggactctggggtgcgctcatcgaaggtccacgacttggccggttcgataacggaggccgtgccatcgctcttcgtggccactcggcgtcacttgttgtccttggaacattcctcctctggtttggatggtacggatttaaccccggttccttcaacaagatcctagtcacgtacgagacaggcacatacaacggccagtggagcgcggtcggacggacagctgtcacaacaacgttagctggctgcaccgcggcgctgacaaccctatttgggaaacgtctactctcgggacattggaacgtcactgatgtatgcaacggcctcctcggagggtttgcagccataactggtggctgctctgtcgttgagccatgggctgcgatcatctgcgggttcgtggcggccctagtcctcctcggatgcaacaagctcgctgagaagctcaaatacgacgaccctcttgaggcagcacaactacacggtggttgcggtgcgtggggactaatattcacggctctcttcgctcaagaaaagtacttgaaccagatttacggcaacaaacccggaaggccacacggtttgtttatgggcggtggaggaaaactacttggagctcagctgattcagatcattgtgatcacgggttgggtaagtgcgaccatggggacacttttcttcatcctcaagaaaatgaaattgttgcggatatcgtccgaggatgagatggccggtatggatatgaccaggcacggtggttttgcttatatgtactttgatgatgatgagtctcacaaagccattcagcttaggagagttgagccacgatctccttctccttctggtgctaatactacacctactccggtttga

SEQ ID NO: 756 - protein, 501 aa, Arabidopsis thaliana
  Arabidopsis thaliana (mouse-ear cress)
MSCSATDLAVLLGPNATAAANYICGQLGDVNNKFIDTAFAIDNTYLLFSAYLVFSMQLGFAMLCAGSVRAKNTMNIMLTNVLDAAAGGLFYYLFGYAFAFGSPSNGFIGKHYFGLKDIPTASADYSNFLYQWAFAIAAAGITSGSIAERTQFVAYLIYSSFLTGFVYPVVSHWFWSVDGWASPFRTDGDLLFSTGAIDFAGSGVVHMVGGIAGLWGALIEGPRLGRFDNGGRAIALRGHSASLVVLGTFLLWFGWYGFNPGSFNKILVTYETGTYNGQWSAVGRTAVTTTLAGCTAALTTLFGKRLLSGHWNVTDVCNGLLGGFAAITGGCSVVEPWAAIICGFVAALVLLGCNKLAEKLKYDDPLEAAQLHGGCGAWGLIFTALFAQEKYLNQIYGNKPGRPHGLFMGGGGKLLGAQLIQIIVITGWVSATMGTLFFILKKMKLLRISSEDEMAGMDMTRHGGFAYMYFDDDESHKAIQLRRVEPRSPSPSGANTTPTPV

SEQ ID NO: 757 - DNA, 1605 bp, Caenorhabditis elegans
  CDS (1)..(1605)
atgacgacgccgacaaatttcacaacagaaattgacaagcttcatgctgaaattaccagacttgagacgggtttctatgagaatgtcaactcgttcttcctctgttccatggctctcatcattttcttcatgcaatgcgggttcgcatatcttgaagcaggagccgtacgtagtaagaacacaacaaacattctgataaaaaatcttcttgactcttgtatttgcatcatcgggtattgggctatcggatgggcactagcatacggagattcaggagagggtgtcaacctttttgttggtcactctcagtttttcctctccggtttttcggattatccccgattcttcttccaatacgtattctctgcaactgccgctactattgtttccggtgccgttgctgaaagatgcgaattcataacctatgtgacttactgcacggtcatttcaacatttatttatccggttctcactcactggggttggacagagaatggatggatggcaaaaggtattacaagtggaattattgacaccaaatacgacgatttcgccggatctggactagttcatctctgcgggggatccatttcattcctggccgcatggatcatgggaccccgaatcggtaaattccctgatgatgaggatgacgaatcggatgaaattcttggtcactctgttccctttactgctttgggaggattcattctgatgttcggtttcctggcgttcaacggaggatcggtggctagtatctcgcatgctggcgacggtcacactgtcgcacttgccatgattaacactattctgagcggagcttttgccgctcttatctaccttggcgttcattactatcaacacggaaaatggacacttcttctaacaattaatgcctgcttgagtggaatggtcgctgcatgtgctggatgtaacaaaatggaaccatgggcttgtatttgggttggacttggagccggactcatctaccttgcgttctcaaaacttatgataaggctgaaaatcgacgatcctcttgacgctttcgccgtgcacgctggtggtggcttctggggattaatgtcatcgtcaattatttctcacggaggagttgcgtacgctttggctgatgcagtttctggtgcaaaaaattcgggtgatcatctcacacaagctttcgcgcaacttggatggcaaatgatctgcgcgctggcaatcatagcttggtcacttggagtcatgttaccaatattctggattctcaaaaaaactggaaagcttcgcgtctcagaagaagtggagatcaatgggctggatgtatttaagcatggagagatggcatacccactccgagcatatggtcatggatggcacgactttgaacgggcgaataagatccaagcatttagcgcaaaaattacagtaggagagggaaaaaatacgaggatcatgaagattcatcctgaaatgtccattgaacaattggcgtcagtgtacgatagaagtggaaacatcatacctatgcccaaaaagtccaggacactgttcacaaattcagctgagcgaaaaatgtcgcaaatgatgtatgatgagaataaaatgtga

SEQ ID NO: 758 - protein, 534 aa, Caenorhabditis elegans
MTTPTNFTTEIDKLHAEITRLETGFYENVNSFFLCSMALIIFFMQCGFAYLEAGAVRSKNTTNILIKNLLDSCICIIGYWAIGWALAYGDSGEGVNLFVGHSQFFLSGFSDYPRFFFQYVFSATAATIVSGAVAERCEFITYVTYCTVISTFIYPVLTHWGWTENGWMAKGITSGIIDTKYDDFAGSGLVHLCGGSISFLAAWIMGPRIGKFPDDEDDESDEILGHSVPFTALGGFILMFGFLAFNGGSVASISHAGDGHTVALAMINTILSGAFAALIYLGVHYYQHGKWTLLLTINACLSGMVAACAGCNKMEPWACIWVGLGAGLIYLAFSKLMIRLKIDDPLDAFAVHAGGGFWGLMSSSIISHGGVAYALADAVSGAKNSGDHLTQAFAQLGWQMICALAIIAWSLGVMLPIFWILKKTGKLRVSEEVEINGLDVFKHGEMAYPLRAYGHGWHDFERANKIQAFSAKITVGEGKNTRIMKIHPEMSIEQLASVYDRSGNIIPMPKKSRTLFTNSAERKMSQMMYDENKM

SEQ ID NO: 759 - DNA, 1347 bp, Streptomyces coelicolor
  CDS (1)..(1347)
atggctccagccatcacgctcgccgcagagacggagctctctgccgccaacacgggcttcatgctcatctgctccgccctggtgatgctcatgaccccggccctggccttcttctacggaggcatggtccgcgtcaagagcaccctgaacatgctgatgatgagcttcatcagcctcggcatcgtcaccgtcctgtgggtgctctacggcttttccatggcgttcggcaccgactccggcagcgtcgtcggctggaactccgactgggtgggcctgagcgacatcggcctgaccgagctgtgggacggctacaccatccccgtcttcgtcttcctggtcttccagctgatgttcgccgtcctcacccccgccctgatcagcggggccctcgcggaccgggtgaagttcacggcctgggcgctgttcatcgccctgtgggccacgatcgtctacttcccggtggcccactgggtctggggcgccggcggctgggccttcgagctgggcgtcatcgacttcgccggcggcacggccgtgcacatcaacgccggtgccgccgcgctcggcgtgatcctcgtcatcggcaagcgggtcggcttcaagaaggacccgatgcgcccgcacagcctcccgctggtcatgctcggcgccggcctgctctggttcggctggttcggcttcaacgccgggtcgtggctcggcaacgacgacggcgtcggcgcgctgatgttcgtcaacacccaggtcgccaccggcgccgccgtcctcggctggctcgcctacgagaagatccgccacggcgccttcaccaccctgggcgcggcctccggcgccgtctccgggctggtcgccatcaccccggcaggcggcgccgtctccccgctcggcgcgatcgccgtcggcctcgtcgccggcgtggtgtgcgccatggccgtcggcctgaagtacaggttcggctacgacgactccctcgacgtggtcggcgtccacctcgtcggcggcatcctcggctcgctgctcatcggcttcttcgccagcggcaagggccagtccgacgtcgagggcctcttctacggcggcggcctcgaccagttctggaagcagtgcgcgggcgtcttcggcgtcctcgcctactccctggtcgtctccgcggtcctcgccttcctgctggacaagacgatcggcatgcgggtgtcggaggacgtcgaggtggccggcatcgaccaggccgagcacgccgagaccgcatacgacttcagcggcgccggcggcggtgccgcccggacgaccgccacgccggccgcctccacggccgggtcggccccgagcaagaaggtggacgcatga

SEQ ID NO: 760 - protein, 448 aa, Streptomyces coelicolor
MAPAITLAAETELSAANTGFMLICSALVMLMTPALAFFYGGMVRVKSTLNMLMMSFISLGIVTVLWVLYGFSMAFGTDSGSVVGWNSDWVGLSDIGLTELWDGYTIPVFVFLVFQLMFAVLTPALISGALADRVKFTAWALFIALWATIVYFPVAHWVWGAGGWAFELGVIDFAGGTAVHINAGAAALGVILVIGKRVGFKKDPMRPHSLPLVMLGAGLLWFGWFGFNAGSWLGNDDGVGALMFVNTQVATGAAVLGWLAYEKIRHGAFTTLGAASGAVSGLVAITPAGGAVSPLGAIAVGLVAGVVCAMAVGLKYRFGYDDSLDVVGVHLVGGILGSLLIGFFASGKGQSDVEGLFYGGGLDQFWKQCAGVFGVLAYSLVVSAVLAFLLDKTIGMRVSEDVEVAGIDQAEHAETAYDFSGAGGGAARTTATPAASTAGSAPSKKVDA

SEQ ID NO: 761 - DNA, 1539 bp, Schizosaccharomyces pombe
  CDS (1)..(1539)
atgtcgtcagtgaattcaattcccacagcaacttctactgtttatatttcagtactgccagctacagctacacctagtggtggtagtggtggaaatgttttgcacgaagatcttaataaattttatgattatggaaacactagttggattttagcttgtactccattgtgtcttattatggtgcctggtgtggcttttttctactctggcttagcaagaaggaaaaatacattggctcttatcatgctctctatgcttggtttatgtgttagttttttccaatggtatttctggggttattctcttgctttttctcaaactggaacctctggttatattggcaatcttcgtcattttgcctttattcgcacacttgccgattactctcctggtagcaataatattcccgagcttgtatttgcaaattttcaaggaatgttcgccgcaattactgtagccctcttcactggtgccgccgctgaaagaggtcgtattggtccaatgctcatcatcacatttgtgtggctcactgtcgtttattgtcccatagcgtgttggatttggaatccaaatggttgggcttttaaatttggtgtatacgatttcgctggcggaggacctgtagaagttggatcaggatttgcagctttggcgtatacggtttgtttaggacgtcgatccaaatttgttgaggaacaatttcgccctcattctgtgctcaatgttgtattgggaacatctctgctatggtttggttggcttggtttcaacggtggtagtgcttacggctccaatctgcgagccgctatggcaatcaccaacacaaacttagcaggtgctgtagctggtttagtatgggttatttacgactacatttttcgcactaggaaatggtcaaccataggtttttgttccggggttgttgccggtttggtggctgcaacgccttgtgctggttttgtgagtcctcatgcctctttggcaattggtgctattactggcttatgttgcaattgggccattaagttaaagtcacatatgcgcattgatgatgcgatggatattttcgctatccacggtgttgcgggttttgtgggtacctttttgaatggtttgtttgccgttgattatatcgcagcaatggatggtatttatgttggtgaaaacaaaatcagaggtggttggtttgatcaccattggcgccaactaggcttgcaaatggcctatatttgtgctgttggtgcatacgactttgttgtcacgtttatcattttattcattacggacaaaattccctaccttcaacttcgagtgagccctgatgctgaagaaattggtgtggatgctgatcaaataggtgaatacgcgtttgattatattgaagaacgtcgtgaatataagcattggaagatttcccctgccggtgtacctgaagaaatcattatttccaatggcgttgctcaacctactggaaatgtggctgctcccggcaagattctagaatcaacaaacccattggagcttggacttacgatctaa

SEQ ID NO: 762 - protein, 512 aa, Schizosaccharomyces pombe
MSSVNSIPTATSTVYISVLPATATPSGGSGGNVLHEDLNKFYDYGNTSWILACTPLCLIMVPGVAFFYSGLARRKNTLALIMLSMLGLCVSFFQWYFWGYSLAFSQTGTSGYIGNLRHFAFIRTLADYSPGSNNIPELVFANFQGMFAAITVALFTGAAAERGRIGPMLIITFVWLTVVYCPIACWIWNPNGWAFKFGVYDFAGGGPVEVGSGFAALAYTVCLGRRSKFVEEQFRPHSVLNVVLGTSLLWFGWLGFNGGSAYGSNLRAAMAITNTNLAGAVAGLVWVIYDYIFRTRKWSTIGFCSGVVAGLVAATPCAGFVSPHASLAIGAITGLCCNWAIKLKSHMRIDDAMDIFAIHGVAGFVGTFLNGLFAVDYIAAMDGIYVGENKIRGGWFDHHWRQLGLQMAYICAVGAYDFVVTFIILFITDKIPYLQLRVSPDAEEIGVDADQIGEYAFDYIEERREYKHWKISPAGVPEEIIISNGVAQPTGNVAAPGKILESTNPLELGLTI

SEQ ID NO: 763 - DNA, 1425 bp, Rhizobium etli
  CDS (1)..(1425)
atgtcaatctcgaagttttcttccacctttgcgcgggtcggcgcagcattggccgcgcttcttgcgccggccgtcgcttttgcgcaggagaccgctgcgccagccgctcgtccgcgtctgcctcgtttcaccatggacaagggtgacaatacctggatgctcgtctcctcggcgctcgtcctgctgatgaccatccccggccttgcgcttttctacggcggtctcgtgcgcgccaaaaacatgctctccgtgctgatgcaggtgttcatgatcacggccgtcgtgtcgctgatctgggtgacctacggctattcgctcgcctttaccgacgggggctcgctgaacagcttcatcggcggcttctccaaagctttccttgccggcgtcaacacatcgtcgctcgccgagacattctcgaagggcgtcgccattccggaatacaccttcatcgtcttccagatgaccttgccctgcatcacgcccggcctgatcgtcggcgccttcgccgaacgcgtgaagttctcggccgtcatgctcttcgtcgtcctgtgggtcaccttcatctacttcccgatggcgcacatggtctggttctggggcggcccgagctcctacagcgcgccggccggcctgatcttctcttacggggcaatcgattttcctggcgcgacggtcgttcacatcaatgccggtaatcgcggccttgtcgcggccatcatgctcggcaagcgcacgggctataagaaggaaatcatgcgcccgcattccatgacgctgaccatggtcggtgcctcgctgctctgggtcggctggttcggcttcaacgctggttccaacctcgaagccaatggctacgcatcgcttgcgatgatcaacaccttcgtcgcagctgccgccgccgtgtcctggtgcatcgtcgaaagcctggcccgtggcaaggcatcgatgctgggtggtgcttccggtgctgtcgccggtctcgtcgccatcaccgcggcggcaggttttgccgcgcgatgggcctcgatcgttctcggtctcgtcgtctcgccgatctgctacttcttcgtcgacgtcgtgaagaacaagttcaactatgacgacagcctcgacgtcttcggcgtccattgcatcggcggcatcatcggcgctctcggcaccggcatcctcgtcaatccggcgctgggcggtgcaggcatcgtcgactattcgacggctgatttcgccgctacctatcgcggaacggcaacccaggtcctgaaccaggcgaagggcgttctcacgaccctcctgtggtcgggcatcggttcggcgatcctctacaagatcgtcgacgtcgtcatcggcctgcgcgtgagcgtcgaagccgagcgcgaaggtctcgacctttcgacccacggcgaacccgcctaccacgcctcctga

SEQ ID NO: 764 - protein, 474 aa, Rhizobium etli
MSISKFSSTFARVGAALAALLAPAVAFAQETAAPAARPRLPRFTMDKGDNTWMLVSSALVLLMTIPGLALFYGGLVRAKNMLSVLMQVFMITAVVSLIWVTYGYSLAFTDGGSLNSFIGGFSKAFLAGVNTSSLAETFSKGVAIPEYTFIVFQMTLPCITPGLIVGAFAERVKFSAVMLFVVLWVTFIYFPMAHMVWFWGGPSSYSAPAGLIFSYGAIDFPGATVVHINAGNRGLVAAIMLGKRTGYKKEIMRPHSMTLTMVGASLLWVGWFGFNAGSNLEANGYASLAMINTFVAAAAAVSWCIVESLARGKASMLGGASGAVAGLVAITAAAGFAARWASIVLGLVVSPICYFFVDVVKNKFNYDDSLDVFGVHCIGGIIGALGTGILVNPALGGAGIVDYSTADFAATYRGTATQVLNQAKGVLTTLLWSGIGSAILYKIVDVVIGLRVSVEAEREGLDLSTHGEPAYHAS

SEQ ID NO: 765 - DNA, 1311 bp, Azotobacter vinelandii
  CDS (1)..(1311)
atgacgctgcgcaaaggcgcagggtcttgctgccctttcttccctcttcctgccccgtcatggccagccgcccaggaggctacgctggattcgggcgataccgcctggatgctgaccgccacggcgctggtgctgttcatgaccattcccggcctggcgctgttctacggcggcatggtgcgttcgaagaacctgctctcggtgatgatgcaatgcttcgccatcaccggcctgatcagcgtgctctgggtcctgttcggttatagcttggccttcgacaccgccggcatggaggagggggtgctcaacttcagttccttcgtcggcggtctggacaaggccttcctcagtggcctgaccaccgacagcctggtcggcacctttcccgaaagcgtcttcatcaccttccagatgaccttcgccatcatcactccggcgctgatcaccggtgccttcgccgagcgcatgaagttctcgtcgatgctggtgttcatgtcggcctggttcctgctggtctacgcaccgatcgcccatatggtctggagcggcaacggcgcgctgatgtgggattggggcgtgctcgacttcgccggcggcaccgtggtgcacatcaacgccggtgtcgccggcctggtcgcctgcctggtgctgggcaagcgcaagggctaccccggagtcgccatgaccccgcacaacctcggctacaccctggtcggcgcggccatgctctgggtcggctggttcggcttcaacgccggctcgcgatcgcgcaacggcaccgccggcatggccatgctggtgacccagatcgccaccgccgccgccgcgctggcctggatccccgccgagtggctgacccacggcaagccgagccctgggcatcgcctccggcgtggtcgcgcctggtggcatcaccccggccgcggtaccgtcggcccgatgggcgccctggtgatcggcctggcttccggctcgatctgtttctactgcgccactgccgtgaagcgccgcttcggctatgacgattctctcgacgccttcggcgtgcacggtgtcggcggcatcgtcggcgcggtgctgaccggcctgttcgcggctccggccctgggcggtttcggcgaaatcgacagtatcgccagccaactgtggatccagatcaagggcgtgctcttcaccgtgatctacaccggcgtcgccaccttcgtgatcctcaaggcgatcgagcgggtgataggcctgcgcatcagcgaagaggaagaaaccatgggtctcgacctctccctgcacaacgagcgcggttacaacctctga

SEQ ID NO: 766 - protein, 436 aa, Azotobacter vinelandii
MTLRKGAGSCCPFFPLPAPSWPAAQEATLDSGDTAWMLTATALVLFMTIPGLALFYGGMVRSKNLLSVMMQCFAITGLISVLWVLFGYSLAFDTAGMEEGVLNFSSFVGGLDKAFLSGLTTDSLVGTFPESVFITFQMTFAIITPALITGAFAERMKFSSMLVFMSAWFLLVYAPIAHMVWSGNGALMWDWGVLDFAGGTVVHINAGVAGLVACLVLGKRKGYPGVAMTPHNLGYTLVGAAMLWVGWFGFNAGSRSRNGTAGMAMLVTQIATAAAALAWIPAEWLTHGKPSPGHRLRRGRAWWHHPGRGTVGPMGALVIGLASGSICFYCATAVKRRFGYDDSLDAFGVHGVGGIVGAVLTGLFAAPALGGFGEIDSIASQLWIQIKGVLFTVIYTGVATFVILKAIERVIGLRISEEEETMGLDLSLHNERGYNL

SEQ ID NO: 767 - DNA, 1482 bp, Azorhizobium caulinodans
  CDS (1)..(1482)
atgaacgtcaagacgtggtcccgcgtgggtcttcccacgctccttgcggcctcggcactcgccctgccggtgctggcccagacggcggcgcccgccgcggacgcgcccgcggcagccgcggccatcccgatcaataagggcgataccgcctggatgctggtctcggccgccctcgtgctgatgatgtcggtccccggcctcgccctgttctacggcggcctcgtgcgcaccaagaacatgctctcggtgctgatgcaggtgttctacaccgtgtccgtcgtcggcatcctgtgggtgctctacggctattcgctggccttcaccggcggctccgacttcgtcggcggcttctccaaggccttcctcgccggcatcacgccggacagcggcaccggcaccttctcggtgggcgtcaacattccggaattcgcgttcatcgcgttccagatgaccttcgccatgatcacgccggccctcatcttcggcgccttcgcggagcgcgtgaagttctcggccatcgtgctgttcgtgccgctgtgggtcaccttcatctatttcccgatggcccacatggtgtggtactgggccggcccggacgcggtggatgccgctgccaaggcgctcgccgccgctgacgctggcggcaaggctgccgcccagtccgcgctcgacgcggtgctcgcggatgccggctacatctacaagctcggcgccatcgacttcgctggcggcaccgtggtgcacatcaatgccggtatcgccgccttcgtcggctgcctgatcgtcggcaagcgcaccggctacggcaaggaggccttccagcctcactcgctcaccctcacgctggtcggcgccggcctgctgtgggtcggctggttcggcttcaacgccggctccaacctcgaagccaatggcctcaccgccctggccatgatgaacaccttcatcgccacctgcgccgccgccctctcctggatggtggtggaatggctggccaagggtaagccctccatgctcggcgtcgtctccggcgctgtggcgggcctcgtggccgtcaccccgatggccggcttcgccggcatcatgggctcgctggtctccggccttatcgtcggcgtgctgtgcttcttcttctgcaccaccgtgaagaacgccttcggctatgacgactcgctcgacgtgttcggcgtgcactgcatcggcggcatcttcggcgccattgccacgggcatcgtggtgagcccggcgctcggcggcaccggcatcttcgactacaccaccggcaaggtggccgactacgacatggccacccaggtcatcgcgcaggtgaaggccgtggttgtcacgctggtgtggtcgggcgtcggctcggcggtcctctactacatcgtgcacgccgtcgtcggcctgcgcgccacggtggagcgcgagcgcgaaggtctcgacatcaccgagcacggcgagcgcgcctaccacagctga

SEQ ID NO: 768 - protein, 493 aa, Azorhizobium caulinodans
MNVKTWSRVGLPTLLAASALALPVLAQTAAPAADAPAAAAAIPINKGDTAWMLVSAALVLMMSVPGLALFYGGLVRTKNMLSVLMQVFYTVSVVGILWVLYGYSLAFTGGSDFVGGFSKAFLAGITPDSGTGTFSVGVNIPEFAFIAFQMTFAMITPALIFGAFAERVKFSAIVLFVPLWVTFIYFPMAHMVWYWAGPDAVDAAAKALAAADAGGKAAAQSALDAVLADAGYIYKLGAIDFAGGTVVHINAGIAAFVGCLIVGKRTGYGKEAFQPHSLTLTLVGAGLLWVGWFGFNAGSNLEANGLTALAMMNTFIATCAAALSWMVVEWLAKGKPSMLGVVSGAVAGLVAVTPMAGFAGIMGSLVSGLIVGVLCFFFCTTVKNAFGYDDSLDVFGVHCIGGIFGAIATGIVVSPALGGTGIFDYTTGKVADYDMATQVIAQVKAVVVTLVWSGVGSAVLYYIVHAVVGLRATVEREREGLDITEHGERAYHS

SEQ ID NO: 769 - DNA, 1317 bp, Azospirillum brasilense
  CDS (1)..(1317)
atgagccgtctcttcaccctcgccgcgccgacgatggcggcgattctgggcttggccggtctgcctgccgccgccctcgcccaggaaagcgccgccgccgcggccgaacccaccctgagcagcggcgacacggcttggatgctggtcgccacggcgctggttctgttcatgaccatcccgggtctggctctgttctacggcggcatggtccgcaagatgaacgtgctgtcggtcgtgatgcagagctttgcgatctgctgcctggtcagcatcctgtggttcttcgccggttacagcatcgcctttaccgaaggcaccccgtatttcggcagcctgtccaagttcatgctggccggcatcaccaaggacagcctgacgggcgtcattcccgagacgatcttcgtcgtctttcagatgaccttcgccatcatcaccccggccctgatcaccggcgccttcgccgaccgcatgaagttctcctcgatgctggtcttcacgggcctgtggtcgctgatcgtctacgcgccgatcacccactgggtctggggtccgggcggctatctggcgggtgacggcgtgctcgactacgccggcggcaccgtggtgcacatcaacgcgggcgtggccggtctggtcgccgccatcgtgctgggcaagcgcaagggctatccgaacgagaacttcgctccgcacaacctggtgctcagcctgatcggcgcctcgatgctgtgggtcggctggttcggcttcaacgcgggttccgccgtggccgccgacggccgtgcgggcatggccatgctggtcacgcagatcgccgccgccaccgccgccatgtcctggctgctggtcgagtgggccaccaagggcaagggttcggttctcggcatcatctccggcgccatcgccggtctggtcgccatcaccccggcctcgggcttcgtcggtccgaccggcgccctggtcatcggtctggccgccggcgtgatctgctactggggcgccaccggcctgaagcgcgccctcggctatgacgactcgctggacgccttcggggtgcacggcgtgggcggcatcgtcggcgccatcctgaccggcgtcttcgcccaggaagccatcggcggcaccgccggcgccctggaaggcaacgtcggccagatctggacgcaggtctacggcattctcgccaccatcgtctactcggcggtcggctccttcatcatcctgaaggtcatcgacgtggtgatgggcctgcgcgtcgacgaggacgtcgagcgcgacggcctggacctcgccctgcacggcgagaccatccactaa

SEQ ID NO: 770 - protein, 438 aa, Azospirillum brasilense
MSRLFTLAAPTMAAILGLAGLPAAALAQESAAAAAEPTLSSGDTAWMLVATALVLFMTIPGLALFYGGMVRKMNVLSVVMQSFAICCLVSILWFFAGYSIAFTEGTPYFGSLSKFMLAGITKDSLTGVIPETIFVVFQMTFAIITPALITGAFADRMKFSSMLVFTGLWSLIVYAPITHWVWGPGGYLAGDGVLDYAGGTVVHINAGVAGLVAAIVLGKRKGYPNENFAPHNLVLSLIGASMLWVGWFGFNAGSAVAADGRAGMAMLVTQIAAATAAMSWLLVEWATKGKGSVLGIISGAIAGLVAITPASGFVGPTGALVIGLAAGVICYWGATGLKRALGYDDSLDAFGVHGVGGIVGAILTGVFAQEAIGGTAGALEGNVGQIWTQVYGILATIVYSAVGSFIILKVIDVVMGLRVDEDVERDGLDLALHGETIH

SEQ ID NO: 771 - DNA, 1314 bp, Wolinella succinogenes
  CDS (1)..(1314)
atgaaaatcgttaaacttttgatcttggccctgctaccggttctgcttttcggagacgaagccgcagcggaggcagcagagaccgctttggaattggacgccgcgaacacggcttggatgttagtggccacagcctttgtcatgctcatgacacccgctggcttggctctcttttatggaggcatgacgcgctctaagaatatgctcaacaccatcggcatgagcgtggtgggctacattctcgcctctcttgtttgggtgggctggggttatggcctagcctttggtgaagacattggcggatttgtgggcgctttggatggattcttcctcagcaatgttaaggtgactgatatttgggaaggcggaaatattcccgtgctcctattcgctgctttccaaatgacttttgcgggtattaccgtagccttggcaagtggatcagtcattgagcgactcaaattctccacatggattctctttgtggtgctttgggtcaccgtggtttacgctcctgtagcacactgggtgtggggcggaggcttcttggctaatgagggtgttcttgattttgccggaggaaccgttgttcatatcaacgctggggttgcaggtctagtcatggcctatatgcttggcaaacgaagcgacaaagataaggcaatcttcccttcatctgtgactttgaccatgctaggggctattcttctatggtttggatggtttggtttcaacgccggaagcgagcttgctgctgatggaatcgccgctagtgctttcatggtgaccaacactgccgcagcggcagcggctttggcttggatgctcattgaatacgccgtctacaagaagttcaccctcatcggtatcgcctcagggattgtggcgggtctcgtggccatcactcctgcagcgggctttgtagacactcctgcctcagtgatcattggtcttgtagcgggtcttgtggccttctttggtatccatgggctcaaaaaagccttgggggcagacgactctctagatgcctttggaatccatggagttgcgggtatctggggagctttggcgacaggactctttgccaaccccgaagtcaacgagctaggcacgggtcttttctatggaaatgcaggtcaattcctcatccagcttgagggcgtagtggtcactatggtctttaccgccatcgccactgccatcgtcttcaagatcgtctgcttgattactggaggaggaagagtggatgcccaagaagagaccatgggtctggatgagtccacccacggcgaaaaaagctttcacttaaagtaa

SEQ ID NO: 772 - protein, 437 aa, Wolinella succinogenes
MKIVKLLILALLPVLLFGDEAAAEAAETALELDAANTAWMLVATAFVMLMTPAGLALFYGGMTRSKNMLNTIGMSVVGYILASLVWVGWGYGLAFGEDIGGFVGALDGFFLSNVKVTDIWEGGNIPVLLFAAFQMTFAGITVALASGSVIERLKFSTWILFVVLWVTVVYAPVAHWVWGGGFLANEGVLDFAGGTVVHINAGVAGLVMAYMLGKRSDKDKAIFPSSVTLTMLGAILLWFGWFGFNAGSELAADGIAASAFMVTNTAAAAAALAWMLIEYAVYKKFTLIGIASGIVAGLVAITPAAGFVDTPASVIIGLVAGLVAFFGIHGLKKALGADDSLDAFGIHGVAGIWGALATGLFANPEVNELGTGLFYGNAGQFLIQLEGVVVTMVFTAIATAIVFKIVCLITGGGRVDAQEETMGLDESTHGEKSFHLK

SEQ ID NO: 773 - DNA, 1320 bp, Photorhabdus luminescens
  Photorhabdus luminescens (subsp. laumondii)
  CDS (1)..(1320)
atgcggcactgtaactcactgatagagaagatagatatgaaaaggcaattctcagtggctgccagtgttgtggccagttgtgtaccatcattatctcaggctgcggaaggcgttgttgataaagcggataatgcttttatgatgatttgtacagtgcttgttctgtttatgaccattccgggaattgctctgttttatggtggattgctacggagtaaaaacgttttatcgctaatggctcaggtcatggtgagctttgctttagtatgtgtgttgtgggtgatttatggttatagcctggcttttgagccagggaatggttttttcggtggttttagtcaagtgatgctaaagaatttggcattcactgacttaagtggcaatttttatcagctaattcatgtggcatttcagggctctttcgcttgtatcactgttgctttgattattggcgcgttaggggagcgtattcgctttccggctttgttagtttttactgtgttgtggctgacattttcttacttgcctatggcgcacatggtttgggggggaggtgtgctttcacaagatggagcattggattttgctggtggtacggttgttcatattaatgctgctgtagctggattggttggtgcttacttactgggaaaacgtactggctttgggaaagaagcatttaaaccgcataacttgccgatggtcttcacgggcactactgtgctctatattggttggtttggttttaatgctggttctgctagtgctgctaatgagatagctgctttggcatttttaaataccattgtggcgactgccgccgctatcctgtcatgggtttttgcagagtggcttttccgtaataaaccgtctcttttaggggcatgttcaggctgtattgctgggctggttggtattacacctgcggcaggaatggttggtgttggtggtgcattaatcattggcctgattgcgggttttaccggactttggggggtggtggccttaaaacggtggttacgtgttgacgatgtgtgtgatgtattcggcatacacggcgtatgtgggatcgtaggttgccttctaacaggggtttttacggctaaatctttgggagggatcggttatgcagagggtataaccatgttgggacaagttggtattcaggcttttagtatactggtttgtgtgatttggtcagtcgttgttgcctttattgcttttaaaatagcagatctgttggtagggctgcgggttacggttgaaattgaaagggaagggttggacattaattctcacggagagagtgcttataattaa

SEQ ID NO: 774 - protein, 439 aa, Photorhabdus luminescens
  Photorhabdus luminescens (subsp. laumondii)
MRHCNSLIEKIDMKRQFSVAASVVASCVPSLSQAAEGVVDKADNAFMMICTVLVLFMTIPGIALFYGGLLRSKNVLSLMAQVMVSFALVCVLWVIYGYSLAFEPGNGFFGGFSQVMLKNLAFTDLSGNFYQLIHVAFQGSFACITVALIIGALGERIRFPALLVFTVLWLTFSYLPMAHMVWGGGVLSQDGALDFAGGTVVHINAAVAGLVGAYLLGKRTGFGKEAFKPHNLPMVFTGTTVLYIGWFGFNAGSASAANEIAALAFLNTIVATAAAILSWVFAEWLFRNKPSLLGACSGCIAGLVGITPAAGMVGVGGALIIGLIAGFTGLWGVVALKRWLRVDDVCDVFGIHGVCGIVGCLLTGVFTAKSLGGIGYAEGITMLGQVGIQAFSILVCVIWSVVVAFIAFKIADLLVGLRVTVEIEREGLDINSHGESAYN

SEQ ID NO: 775 - DNA, 1437 bp, Gloeobacter violaceus
  CDS (1)..(1437)
atgttaatgaaatgtaaatggaaatggggattgggcacgctggcagcggctctcgccactgccgccccggcgtttgcccaggacgcgccgaagatcgacaccggcgacaccgcctgggtgctggtttcggccgcgctggtgctgctgatgacccccggcctggcctttttctacggcgggctggtgcgaggcaagaacgcactgaacactttgatgatgagttttgttgccctcggggtgatcgcgctcgtttggacgctggtgggctactcgatcgcttttggacccggtaacggttactttggcagcttcgcctggctcggcctcaacggggtcgggcaggatccaaacaccgcccaggctgccaccgtgccgcacctggcgttcatgatttttcagatgatgtttgcggtgattaccccggcgctgatttccggtgccatcgtcgatcgcatgaagttcaagacctacgtcgtgttcatcatgatctggtcggtcgtggtctactcgccggtggcccactgggtctggtcgctgggtaaccccgacccgaccgatgcggccaagatgctgcctggctggctcggggctatcggggcgctcgactttgccggcggtacggtggtgcacctgacggccggtatctcggctttggtggcggcgatcattcttggtccgcgcaaaggctttcccaaccagccgatgactccccacaacgtgccttttgtgctgttgggagcggggctgttgtggttcggctggttcggcttcaacgccggttcggcgctcgccgccaatggcctcgcttcgctggcttttgtgacgacgaatgtcgccacggcggcggctctatccacctggcttttgcttgacacgtttatcggcggcaaaccgacggcggtgggtgcagccaccggtgcggtcgtcggtctggtggcaatcaccccggcggcgggttttgtcagcccgctttcgtcgattgcgatcggcggtatcgccgcgatcatctccttcgccgccattcaactgaagaaaaagctcaactacgacgattcgctcgacgtgtttgcctgccacggcatgggcggtctgaccggcgccattctcactggggtgtttgccgacaaatcgctcaattccctgggtgataacggcttgctcctgggcaacggggcgcagcttattgagcaattgattggtgtcggtgccgttgccgtctacgcagcggtctgcacgacggtcattttgctggcgctcaagttcaccctgggactgcgcccgagcgaggaagccgagcaggagggcctcgacaccgccgagcacggcgaggaagcctacaccggcagcatcggcggccttggcgccatggaagaagcgatgtcctccacttcccagggccagggttttacccgaccggcgacccagcagcaagaatag

SEQ ID NO: 776 - protein, 478 aa, Gloeobacter violaceus
MLMKCKWKWGLGTLAAALATAAPAFAQDAPKIDTGDTAWVLVSAALVLLMTPGLAFFYGGLVRGKNALNTLMMSFVALGVIALVWTLVGYSIAFGPGNGYFGSFAWLGLNGVGQDPNTAQAATVPHLAFMIFQMMFAVITPALISGAIVDRMKFKTYVVFIMIWSVVVYSPVAHWVWSLGNPDPTDAAKMLPGWLGAIGALDFAGGTVVHLTAGISALVAAIILGPRKGFPNQPMTPHNVPFVLLGAGLLWFGWFGFNAGSALAANGLASLAFVTTNVATAAALSTWLLLDTFIGGKPTAVGAATGAVVGLVAITPAAGFVSPLSSIAIGGIAAIISFAAIQLKKKLNYDDSLDVFACHGMGGLTGAILTGVFADKSLNSLGDNGLLLGNGAQLIEQLIGVGAVAVYAAVCTTVILLALKFTLGLRPSEEAEQEGLDTAEHGEEAYTGSIGGLGAMEEAMSSTSQGQGFTRPATQQQE

SEQ ID NO: 777 - DNA, 1311 bp, Chromobacterium violaceum
  CDS (1)..(1311)
atgaaaaagatactcgctgcaatggcttccgggctcgccgccctctccctgcccgcgctggccgatgcgccggccggcccggcggtggccgccgccaaggtgatcaactccggcgacaccgcctggatgctgacctccaccgccctggtgctgttcatgaccattcccggcctggcgctgttctatggcggcatggtccgcaagaagaacgtgctggccacgctgatgcagagcttcgccatcaccgcgctggtgaccgtgctgtgggccgtcgtcggctacagcctggccttcaccgtcggcaccccctatatcggcgacctgtcccgcgtgctgctggacggcatggtgtacatgaaggacgccggcaagctggcggtgcatccgctggccggcaccatcccggaatcggtgttcatgaccttccagatgaccttcgccatcatcaccccggcgctgatcaccggcgccttcgccgagcggatgaagttctctgcgatgctggtcttcatggcgctgtggtctctgctggtctatgtgccggtcgcccactgggtatgggcgccgggcggctggatgggcgacaagggcgtgctggacttcgccggcggcaccgtggtgcacatcaatgccggcgtggccggcctggtgaccgcgctggtgctgggcaagcgcgtcggcttcggccgcgaggcgatgccgccccacaacctggtgctgaccctggtgggcgcgtcgatgctgtgggtgggctggttcggcttcaacgccggctcggcgggcgccgccgacggccgcgccggcatggcgatggtcaccacccaggtcgccaccgcgatggccgcgctggcctggatgttcgccgaatggatcgccaagaaaaagccttcggtactgggcatcgcctccggcgcggtggccggcctggtggccatcaccccggccgccggcttcgtcgacgtcaagggcgcgctggccatcggcctggccgccggcgtgatctgcttctggggcgccaccggcctgaaacacatgatgggctacgacgactcgctggacgctttcggcgtgcacggcgtgggcggcatcctgggcgcgctgctgaccggcgtgttcgcggtcaaggacatcggcggcgccgacggcagcctggccacccaggcgctgggcgtgggcgtgaccatcgtctactgcggcgtggtcaccttcatcctgctgaagctggtggacatcgtgctcggcctgcgcgtcgcggaggacgaggaacgcgaaggcctggatctggtgctgcacggcgagcgggtggaataa

SEQ ID NO: 778 - protein, 436 aa, Chromobacterium violaceum
MKKILAAMASGLAALSLPALADAPAGPAVAAAKVINSGDTAWMLTSTALVLFMTIPGLALFYGGMVRKKNVLATLMQSFAITALVTVLWAVVGYSLAFTVGTPYIGDLSRVLLDGMVYMKDAGKLAVHPLAGTIPESVFMTFQMTFAIITPALITGAFAERMKFSAMLVFMALWSLLVYVPVAHWVWAPGGWMGDKGVLDFAGGTVVHINAGVAGLVTALVLGKRVGFGREAMPPHNLVLTLVGASMLWVGWFGFNAGSAGAADGRAGMAMVTTQVATAMAALAWMFAEWIAKKKPSVLGIASGAVAGLVAITPAAGFVDVKGALAIGLAAGVICFWGATGLKHMMGYDDSLDAFGVHGVGGILGALLTGVFAVKDIGGADGSLATQALGVGVTIVYCGVVTFILLKLVDIVLGLRVAEDEEREGLDLVLHGERVE

SEQ ID NO: 779 - DNA, 1479 bp, Neurospora crassa
  CDS (1)..(1479)
atggccgagccagaaattgtgcctgtcaccgagtggccggactggcatgccaatcccaacggaggtgatcccttcacgcagaacctgaactcaccctatgacaagggcgacctatgctggatgctcgtgtgcactgccctatgctggcaaatcaccccggccattggcttcctctatgccggaatgcaccgcaggaaggcggctctgaccatggtcctccaaagtctcttctgtgcttgcgcttgcggaatccagttctggatatacggttactcactgtaccaggcacgaacaacaaaccccatcctcggagacttgtctttggccgtgttccgaaatgtgcttgctcagccatccatggccaactcggatattcctgatattctgtatgctgcctttggctttaccttcgtttcttgcactgccatgatcttggccggagccatgcttgaacgcggcaggctattgcccagtatgcttttcctcctctgctggactacttttgtttactacttcattgcatattgggagtggaaccctagcggatggttatacaaactcggtgtctacgatttcgccggctccggtcctgttcacatcgccagcggcttcggtgcccttgcctggtctctgatgctcggtccgcgtgtcgccgactcggacgtcgttgaccgtaagaaactcgttcaccacaagccccacagtccgctgttgatgtgcctcggaactgtcttcatctggtttggctggttcgccttcaatggcggcagtacacccaacctgagcctgcggtccatctacgccattgtcaacacgaatctggcaggatgcggaggtggcgtcggttgggtcttgatcgactatctctacaagagaaagttcagcttggttggcttttgctcgggtattattgcgggcttggtcggaattacccctgcagcgggttatgtccccgtctacgtagcctcgctcatcggcttcctcacctccgccacctgctactacgccgccaagtacaagcatctcctctctgttgacgacggtctcgacatttttgccattcacggcgtgggcggttacgtcggtgatcttttgacgggcatctttgccgacaactttgttcccgctctcgatggctattcaggcagctcctatgcagggggctggtggaaccgcaacttccgccagcttggacttcagttcgccggcgcaaccactgccgcggcctggtcctttgtggtgtcgtgtatcttgctgttcatcatcaacaagattcctggcttgcatctgcgcgcgagtgaggactcggaaatcaggggtctggatatcaagtacttggaggatgtggatgaggagggattttatatgaacgagtgtatactgcacgggcgtacgccgccgaggtgttctgggtcgttgaaggctcctacgtcggttacggagccggttggtgttgaaggaggtgaaaaaagggattag

SEQ ID NO: 780 - protein, 492 aa, Neurospora crassa
MAEPEIVPVTEWPDWHANPNGGDPFTQNLNSPYDKGDLCWMLVCTALCWQITPAIGFLYAGMHRRKAALTMVLQSLFCACACGIQFWIYGYSLYQARTTNPILGDLSLAVFRNVLAQPSMANSDIPDILYAAFGFTFVSCTAMILAGAMLERGRLLPSMLFLLCWTTFVYYFIAYWEWNPSGWLYKLGVYDFAGSGPVHIASGFGALAWSLMLGPRVADSDVVDRKKLVHHKPHSPLLMCLGTVFIWFGWFAFNGGSTPNLSLRSIYAIVNTNLAGCGGGVGWVLIDYLYKRKFSLVGFCSGIIAGLVGITPAAGYVPVYVASLIGFLTSATCYYAAKYKHLLSVDDGLDIFAIHGVGGYVGDLLTGIFADNFVPALDGYSGSSYAGGWWNRNFRQLGLQFAGATTAAAWSFVVSCILLFIINKIPGLHLRASEDSEIRGLDIKYLEDVDEEGFYMNECILHGRTPPRCSGSLKAPTSVTEPVGVEGGEKRD

SEQ ID NO: 781 - DNA, 1365 bp, Neurospora crassa
  CDS (1)..(1365)
atgacggtgtcacccgttcttgcagcctgggaggcttgcgacaagacagacactctcttcgtcctcatctgcaccgtcatctgctggaccattgtaccaactgtcggcatagcctactcaggatacacatggaagcgcaacgccctacacgccgccatgcccgccatcctcaccattgcgacttgctcgatccagtggttcattgttggatacacactagcctacggcgagggcggctggttctttggttccctcaagcacttctttcataaggatgtgctttccgagccggtaggaagaataccggccattttattcagcgagtttcagttggtttttgaggcaacggtttgtgcaattgctgtgggcggattctgcgagagggggaggctgttgccggttattccgttcatctttctgtgggcgacatttatctactgcccgctggcacatatggtctggggcggaggcttgcttggagagaatttaggcgtgctggactttgcaggaggaactcccgtccacgtctgctccggcgccaccgcgaccgccatcagcatctacctctcctacccgctcttccgctcgcgcaagtccgacgtgcgtacgcccacccacatccgcatccaccgaccgggtaactctttcttccagcttctgtccttaatcatcatctggggctcctggctcgccttcgatgcgggaaccaccctggccctcaacttccagtccgtcatggccctctgcgtcaccaacttgtgcgccgcctcgggcgcactgacctggaacctcatcaccttctacgagacgggcaagtggtccgtcgattcgaccttcatgggcgccatttccggtcttgtcatgatcaccccctcggctgggttcatcgacatgccgaccgcctgtttctttggtatttttggggctgtgctctgtcgtcaggcgttgaggatcaagttcaccaagtttgcgcatcattggaggtgggttgacaatggtgatacgtttgcgacgcactgcattggtggtgtggctgcaaccattatgacgggactgtttgcgcagaaggagctcgctgcgtatggtggtgtggaggttgcgggtggtgtcatcttcgatggcaatattcgtcaactttgggtgcagatggttgaggctgttgttggtttcacatgggcgttttgcgggtcgtatatcattattgctttgattgattgcgttcctgggcttgaggttttggctgttgataaacacattagccaaggccttgatatgaacgaggttgaagagtttttgggtaacttggagtatcctgatgaagttgactatgcaccaactgcaaggggaaccatttctctggaataa

SEQ ID NO: 782 - protein, 454 aa, Neurospora crassa
MTVSPVLAAWEACDKTDTLFVLICTVICWTIVPTVGIAYSGYTWKRNALHAAMPAILTIATCSIQWFIVGYTLAYGEGGWFFGSLKHFFHKDVLSEPVGRIPAILFSEFQLVFEATVCAIAVGGFCERGRLLPVIPFIFLWATFIYCPLAHMVWGGGLLGENLGVLDFAGGTPVHVCSGATATAISIYLSYPLFRSRKSDVRTPTHIRIHRPGNSFFQLLSLIIIWGSWLAFDAGTTLALNFQSVMALCVTNLCAASGALTWNLITFYETGKWSVDSTFMGAISGLVMITPSAGFIDMPTACFFGIFGAVLCRQALRIKFTKFAHHWRWVDNGDTFATHCIGGVAATIMTGLFAQKELAAYGGVEVAGGVIFDGNIRQLWVQMVEAVVGFTWAFCGSYIIIALIDCVPGLEVLAVDKHISQGLDMNEVEEFLGNLEYPDEVDYAPTARGTISLE

SEQ ID NO: 783 - DNA, 1533 bp, Neurospora crassa
  CDS (1)..(1533)
atgtcgtattcatggttcggggcccctacccctttcaatggcacgacgcccaacggcggtgattccgcctccgaaaacctcaaccaatggtaccagtcaggcgaccaggcttttattctagttgcatcatgcatggtcctcatcatgattcccggcatcgccttcctctactccggccttgcccgtagaaagtcagctctatcactcatttgggtgtgcatgatgtcttccagtgttgtcatgtttcaatggtacttctggggctactcattggcgctcagcagcacagcgaccaacggctttattggcaacctgcgacactttggtctcatgaacacactcggtgcaccttctcccggctctaatctcattcctgagctactctatgctttctaccagatgcaattcgtcggcgtcaccgcagcccttgttgttggggccaccgccgaacgcggtcgcgttgtcccagcaatggtcttcatctttatctgggcaacactggtctactgccctctctgttgctgggcttggaacgtcaacggttgggccttcaagtacggagtgatggattatgctggtggtggtcccgtcgaaattggatccggtgtctcggctctggcttattcttgggttctcggccgacgtaacgagaagatgatgctcaactttcgcccacacaacatctccctgatcaccattggtacggtcttcctttggttcggctggctcggcttcaacggcggatctgcttttggcgccaaccttcgcgccgccatggcgtgctggaattcgtgtctcacagccatgttcgcggccatgacctggacccttctcgattaccgtctggccaagaagtggtcgctcgtcggctggtgttccggtaccatttcgggtctcgtcgccgctactcctgcttccggttatatccctccttgggccagcatcattctcggagttgttactggaattgtttgtaacttcggcactaagatcaagttcatgattggcatcgacgacgctctcgatatattcgctgaacacgctcttggaggcgttgtgggtctgatcttcaacggtttctttgctgccgattacatcattggcttggatggcgtcaaccaggaaatccccggcggcttcctcaaccacaactataagcagttgtacattcagatcgcctatgtttgcgccacaatgggatattctttcgtcatgtctgctatcctcgccaagggcgtcgacatgatcccaggtctacacctccgcgcttccgaagaagccgagctcctcggcatggatgatgaccagcatggcgagtttgcttacgactacgttgaggttcgccgcgattacctggcatggacaccagcagagaaagagcagaggcaagacggcgacatcatcgtccctcagcacggcatcgaagggcatcaggagctgttgagcagctctcgccacggacccaccatgtccgaactcccacaccatgaagaggaggatccgcgagagaagaggggctcgacctcagaataa

SEQ ID NO: 784 - protein, 510 aa, Neurospora crassa
MSYSWFGAPTPFNGTTPNGGDSASENLNQWYQSGDQAFILVASCMVLIMIPGIAFLYSGLARRKSALSLIWVCMMSSSVVMFQWYFWGYSLALSSTATNGFIGNLRHFGLMNTLGAPSPGSNLIPELLYAFYQMQFVGVTAALVVGATAERGRVVPAMVFIFIWATLVYCPLCCWAWNVNGWAFKYGVMDYAGGGPVEIGSGVSALAYSWVLGRRNEKMMLNFRPHNISLITIGTVFLWFGWLGFNGGSAFGANLRAAMACWNSCLTAMFAAMTWTLLDYRLAKKWSLVGWCSGTISGLVAATPASGYIPPWASIILGVVTGIVCNFGTKIKFMIGIDDALDIFAEHALGGVVGLIFNGFFAADYIIGLDGVNQEIPGGFLNHNYKQLYIQIAYVCATMGYSFVMSAILAKGVDMIPGLHLRASEEAELLGMDDDQHGEFAYDYVEVRRDYLAWTPAEKEQRQDGDIIVPQHGIEGHQELLSSSRHGPTMSELPHHEEEDPREKRGSTSE

SEQ ID NO: 785 - DNA, 1473 bp, Synechococcus sp.
  Synechococcus sp. (strain WH8102)
  CDS (1)..(1473)
atgacaactgcattccactcgcctaccagtaggcgccgaaaaacattgcaggaggccaacctcctcgaaggtccgttgatgctgattaagagcatccggggcttcagctccaaccgtgccatgacctggctcgcctgcgctccactggcgctgatgggtctcggcattttcactctctcagcaaaagccgaagagctgccagatctcaatgcagccttcctcgccaacaacctctggctgctggtggccaccatcctggtgatcttcatgaacgccggcttcgccatggtggaagccggcatgtgccgccaaaaaaatgccgtcaatattctcgccaagaacctgttcgtcttcgccctggcggtaaccgcctactggtttgttggctattccttcatgtacggagacgccgccatcgatggctggctgtatttcggggggctcttcttcgatccaaccgtcaccgctgaaaccatcagcgacgctggcctggttcccactgttgatttcctcttccaggctgctttcgccgggacagcagccacgattgtttccggtcttgtggctgagcggatcaagttcggcgaattcgtggtcttcgccctgatcctcactgcctttatttaccctgttgcaggcagctgggaatggaatggcggctggctcaacagcgtcggcaatgccgaattcattgactttgccggttcttcgatcgtgcactccgtcggtgcctgggctggccttgtgggtgctgcactgcttggaccccgcatcggcaaatacgtcggcggcaatgtgcaggccatccctggccacaacatgtccatcgcaaccctcggcgcgctgatcctctggatcggctggtacggcttcaaccccggctcccaactggccatggatcagtgggtcccctacgtggctgtcaccaccaccctcggcgctgccggcggtgccatcggcgccacggtgatctccacgatcacctccaaaaagcctgacctcaccatgatcatcaacggcatcttggccggcctggtgagcgtgaccgccggttgcggcaacctcaccctgactgggtcctgggttgccggcttggtgggcggcatcatcgtcgtcttctcggtgtctgctcttgactctgcgggcatcgatgatcccgtcggcgccttctccgtccatggagtctgcggcgtctggggcaccctggtgatcggtctttggggtttcgacgttcagggtgatggatcccccctcggccttctggtcggcggtggtattgaacaactcggcatccaagctttgggtaccgctgcttacgccatctggaccgttgtgacctgcttcatcgcctggcaaatcatcggtgctctcttcggtggcatccgcgttaccgagcaggaagagaccgaaggtctggacatcggcgagcacggcatggaggcctacgccggcttctccaccaccaataactga

SEQ ID NO: 786 - protein, 490 aa, Synechococcus sp.
  Synechococcus sp. (strain WH8102)
MTTAFHSPTSRRRKTLQEANLLEGPLMLIKSIRGFSSNRAMTWLACAPLALMGLGIFTLSAKAEELPDLNAAFLANNLWLLVATILVIFMNAGFAMVEAGMCRQKNAVNILAKNLFVFALAVTAYWFVGYSFMYGDAAIDGWLYFGGLFFDPTVTAETISDAGLVPTVDFLFQAAFAGTAATIVSGLVAERIKFGEFVVFALILTAFIYPVAGSWEWNGGWLNSVGNAEFIDFAGSSIVHSVGAWAGLVGAALLGPRIGKYVGGNVQAIPGHNMSIATLGALILWIGWYGFNPGSQLAMDQWVPYVAVTTTLGAAGGAIGATVISTITSKKPDLTMIINGILAGLVSVTAGCGNLTLTGSWVAGLVGGIIVVFSVSALDSAGIDDPVGAFSVHGVCGVWGTLVIGLWGFDVQGDGSPLGLLVGGGIEQLGIQALGTAAYAIWTVVTCFIAWQIIGALFGGIRVTEQEETEGLDIGEHGMEAYAGFSTTNN

SEQ ID NO: 787 - DNA, 1590 bp, Rhodopirellula baltica
  CDS (1)..(1590)
atggcggaaattacgcttcatccaccatcatccccatcgacttttcactggagcctgcccggaatgttgtcacgcgtgttggttgtcgtttgtttgctcacgtgcattctcggtgtgcccctggtcggcctgccggttgccagtgtgggggctcaggacgaggtcgcaaatacctcggcggctgagactgcaccggccgaaccgtcggcttcggcggaggaaattgccccggcggaggaaaacgaagcagccgaggagccggccgctccgacattggaaagcctgcaagcgggagtcgatgaggctttgctggccggacacaacggttggatgctggtttgttgtgctttggtgttgttcatgaccgcaccaggcctggcgatgttctacggtggtttggtgcgtcgcaaaaatgttctcagcgtgatgatgcagtgcatcttcttgatgggaatgatgacggtgctttgggcactctacggttactcgtttgccttcggtggatcaggcggttggttcggcaacacggactacttgttcatggaaggtgtccagcggtactgggacgatgacttgggcaaagccatcacgccgatggaaggcgcgatgacgcgaatgactcacatgttgttccaaggcatgttcttcatcatcacgcccgctctgatctgcggtgcattcgcggaacggatgaagtttagcgcgatggtggttttctcgatcctttggggaacattcatctattgcccactgacccactgggtttgggacgaaggacctttgtcgtactttgccggtgacaaagccttggccgggggagcactcgactttgcgggtgggacggttgttcacatcagcagcgggatctcggctttggtcgcggcgttgctgatcggtcctcgaatggggtacccacgcgaacctttgcaaccgcacaacttgacctacacggcacttggtgccgcgatgttatgggtgggatggttcggcttcaacgccggcagtgaacttgcatcggatgatttgacagccagtgctttcgccgtgactcacttttcggccgccgccggggcggttgcttgggtgacacttgaatggctggtccttggcaagccgaccgttctgggcgccagcagtggtgcggtcgccggattggtttgcatcacaccggccgctggatttgttcagcccatgccagctttgatcatgggagcgatggcgggcggagtttgttattgggcgtgttcgacgctgaagcacaaacttcgttatgacgatgctttggatgcgtttggcgtccacggagtcggcggcacactcggcgcaattctgaccggcgttttcgcgactcgtgcggcctgggatgtcagcgatggtgtgccaatcggattgatcgaatcgggcggtgacttcaccttggtcatcgggcaggttgtcgccgtgctggtcacctacgtgttcgccggagtcggaagtctgatcctgctgaagctgatcgacatctgcatcggactgcgagttcctgccgaaagcgaacagcgtggtttggacatttcagatcacggcgaagaaggttatcagttcgcctga

SEQ ID NO: 788 - protein, 529 aa, Rhodopirellula baltica
MAEITLHPPSSPSTFHWSLPGMLSRVLVVVCLLTCILGVPLVGLPVASVGAQDEVANTSAAETAPAEPSASAEEIAPAEENEAAEEPAAPTLESLQAGVDEALLAGHNGWMLVCCALVLFMTAPGLAMFYGGLVRRKNVLSVMMQCIFLMGMMTVLWALYGYSFAFGGSGGWFGNTDYLFMEGVQRYWDDDLGKAITPMEGAMTRMTHMLFQGMFFIITPALICGAFAERMKFSAMVVFSILWGTFIYCPLTHWVWDEGPLSYFAGDKALAGGALDFAGGTVVHISSGISALVAALLIGPRMGYPREPLQPHNLTYTALGAAMLWVGWFGFNAGSELASDDLTASAFAVTHFSAAAGAVAWVTLEWLVLGKPTVLGASSGAVAGLVCITPAAGFVQPMPALIMGAMAGGVCYWACSTLKHKLRYDDALDAFGVHGVGGTLGAILTGVFATRAAWDVSDGVPIGLIESGGDFTLVIGQVVAVLVTYVFAGVGSLILLKLIDICIGLRVPAESEQRGLDISDHGEEGYQFA

SEQ ID NO: 789 - DNA, 1479 bp, Prochlorococcus marinus
  Prochlorococcus marinus (strain MIT 9313)
  CDS (1)..(1479)
atgacaactgctccgcttccgcgctccaggcggcgcacggtacgcctccaggaggccagcctcctggaggggccaatgctcctcctgcgcagcatccgtggcttcagctccaatcgctcactgacgtggctggcttgcgtgcccttggctctcttcggcctaggactcttcaacctctcggcccatgccgccgagatgccagaactgaatgctgccttcctagccaacaatctctggcttctggttgcaacgattctggtgatcttcatgaatgccggcttcgcgatggtcgaagcaggaatgtgtcgtcaaaaaaacgcggtcaacattctcgccaaaaacctatttgtctttgccctagcggtatcgtcgtactggttcatcggctattcgctgatgtacggcgatcctgtttcggcaggatggctctatttcaacggcctgttctttgatcctgctgtaacccctgaactgatcagcgaagcaggtcttgtcccaagcgtcgacttcctcttccaagcagcctttgcaggcacagctgcaactatcgtctcaggactcgtggcagagcgcgtcaagttcggcgagttcgtggtgttctccctagtgctaactggtttcatttacccaatcgctggcagctgggaatggaacgggggctggctcaacactgcctttggcgaaggcgttgaattcattgatttcgcaggctcctcgatcgttcactctgtcggtgcctgggcaggtctggtgggagcaatgctgctcggtccgcgcatcggcaaatttgtcggtggcaaggcccaagcgattccaggacacaacatgtccatcgccacccttggcgctctaatcctctggatcggctggtatggctttaatcccggttcccagctcgccatggatcaatgggtcccctacgtggctgtaacaaccacactcgcagctgcaggtggcgccatcggcgcaacgatcatttccaccctctgctccggcaagcctgatctaacgatgatcatcaacggcatccttgccggcctagtgagcattacagctggttgtggcaatctcacgctggtaggggcctgggttgcaggcctaatcggtggtttcattgtggtgttctcggtctcagcccttgactctttaggcatcgacgatccagttggagctttctctgtccacggcatctgtggcatctggggaaccctcgtgatcggcctatggggctttgacatccaaggtgatggttccgcccttgggctattcgttgggggtggcgcaagtcagctttgggctcaatttgtaggctgcgctgcctacgccatctggaccgtggtgacctgttggattgcctggtctgtcatcggagcactgtttggcggtatccgcgtaacagaggctgaggaaatcgaaggtcttgatatcggtgagcacggtatggaggcttatcccgacttcgcctcagccggcaactaa

SEQ ID NO: 790 - protein, 492 aa, Prochlorococcus marinus
  Prochlorococcus marinus (strain MIT 9313)
MTTAPLPRSRRRTVRLQEASLLEGPMLLLRSIRGFSSNRSLTWLACVPLALFGLGLFNLSAHAAEMPELNAAFLANNLWLLVATILVIFMNAGFAMVEAGMCRQKNAVNILAKNLFVFALAVSSYWFIGYSLMYGDPVSAGWLYFNGLFFDPAVTPELISEAGLVPSVDFLFQAAFAGTAATIVSGLVAERVKFGEFVVFSLVLTGFIYPIAGSWEWNGGWLNTAFGEGVEFIDFAGSSIVHSVGAWAGLVGAMLLGPRIGKFVGGKAQAIPGHNMSIATLGALILWIGWYGFNPGSQLAMDQWVPYVAVTTTLAAAGGAIGATIISTLCSGKPDLTMIINGILAGLVSITAGCGNLTLVGAWVAGLIGGFIVVFSVSALDSLGIDDPVGAFSVHGICGIWGTLVIGLWGFDIQGDGSALGLFVGGGASQLWAQFVGCAAYAIWTVVTCWIAWSVIGALFGGIRVTEAEEIEGLDIGEHGMEAYPDFASAGN

SEQ ID NO: 791 - DNA, 1509 bp, Prochlorococcus marinus
  CDS (1)..(1509)
atgaccactgctttgcaatcgccgccaaggcgtcgcattgcccgccttcaagaagtcagtcttcttgaagggccaatgcttctcctccgtagcattcgtggatttcgatccaatcaatccttgatttggttggcaacagttccattggcacttttaggcttaggggtttttgggtttgctgctcgtgcaggcgtaggactatctgatttatcaggcgctcaagctgcgagcttcttggcagataacctatggctttttatagcaacgatccttgtaatttttatgaatgctggcttcgcaatggttgaagctgggatgtgtcgtcaaaagaatgcagtgaacattttggccaaaaacctttttgtttttgctcttgctgtaactgcttattggttcattggttattccataatgtatggaggaactccaattattggtggagtaattttttctaatggctttttcttcaaccctgatccgtcagatgcacttagttgtgccgctggattaggagctgatggatgtagtcaattagtccctgcagtagacttcctctttcaggctgcttttgcaggtacagcagcaactattgtttctggtcttgtagcagagagagtgaagtttggagaatttgttgttttctcgctagtccttactgctttcatatatccaattgctggtagttggcagtggaatggcgcaggttggttatcgcagttaggtttcattgattttgcgggctcttcaattgtccactcagttgggggatgggctggtcttgtaggagcaatgcttcttggaccaagaattggcaaatttgttgatgggaagccccaagcaatgccagggcacaacatggcaatcgcaactcttggtgctctgatcctttggattggttggtatggctttaacccaggttcagagttggctatggatgaatatgtagcttacgttgcagttacaacaactcttgcagcagctggtggagctattgcagctacattgctttctactcttacttccggcaagccagatctaacaatgatcattaatggaatattggctggtcttgtaagcattactgctggctgtggaaacatgacactttctggatcttggcttgcaggatttgttggaggcttaatagttgttttcgcagtttctgctttggattcagctggaatagatgacccagttggagctttctcagttcacggtgtatgcggcgtttggggaacagttgttattggtctctggggcgttgatggaatggatccaggagcagctgggattggcttgtttaatgggggaggactaaacactttgcttattcaggcacttggagcaggtgcttatgcaatatggacagtagtaacctgttggctagcttggactgttattggtggtttcttcggtggcattcgtgttagtgaggaggaagagattcaaggtcttgatataggtgaacatggtatggaggcatatccagacttcgcttcatctaattaa

SEQ ID NO: 792 - protein, 502 aa, Prochlorococcus marinus
MTTALQSPPRRRIARLQEVSLLEGPMLLLRSIRGFRSNQSLIWLATVPLALLGLGVFGFAARAGVGLSDLSGAQAASFLADNLWLFIATILVIFMNAGFAMVEAGMCRQKNAVNILAKNLFVFALAVTAYWFIGYSIMYGGTPIIGGVIFSNGFFFNPDPSDALSCAAGLGADGCSQLVPAVDFLFQAAFAGTAATIVSGLVAERVKFGEFVVFSLVLTAFIYPIAGSWQWNGAGWLSQLGFIDFAGSSIVHSVGGWAGLVGAMLLGPRIGKFVDGKPQAMPGHNMAIATLGALILWIGWYGFNPGSELAMDEYVAYVAVTTTLAAAGGAIAATLLSTLTSGKPDLTMIINGILAGLVSITAGCGNMTLSGSWLAGFVGGLIVVFAVSALDSAGIDDPVGAFSVHGVCGVWGTVVIGLWGVDGMDPGAAGIGLFNGGGLNTLLIQALGAGAYAIWTVVTCWLAWTVIGGFFGGIRVSEEEEIQGLDIGEHGMEAYPDFASSN

SEQ ID NO: 793 - DNA, 1497 bp, Oryza sativa
  Oryza sativa (Rice)
  CDS (1)..(1497)
atggcgacgtgcgcggcggacctggcgccgctgctggggccggtggcggcgaacgcgacggactacctgtgcaaccggttcgccgacacgacgtcggcggtggacgcgacgtacctgctcttctcggcgtacctcgtgttcgccatgcagctcgggttcgcgatgctctgcgccgggtcggtgcgggccaagaacacgatgaacatcatgctcaccaacgtgctcgacgccgcggccggggcgctcttctactacctcttcggcttcgccttcgccttcggcacgccgtccaacggcttcatcgggaagcagttcttcggcctcaagcacatgccgcagaccgggttcgactacgacttcttcctcttccagtgggccttcgccatcgccgccgccgggatcacgtcgggctccatcgccgagaggacgcagttcgtcgcctacctcatctactccgccttcctcaccgggttcgtctacccggtggtgtcccactggatctggtccgccgatgggtgggcctctgcctcccgcacgtccggacctctgctgttcggctccggtgtcatcgacttcgccggctccggcgtcgtccacatggtcggcggtgtcgccgggctctggggcgcgctcatcgagggcccccgcatcgggaggttcgaccacgccggccgatcggtggcgctcaagggccacagcgcgtcgctcgtcgtgcttggcaccttcctgctgtggttcggctggtacggattcaaccccgggtcgttcaccaccatcctcaagacgtacggcccggccggcggcatcaacgggcagtggtccggagtcggccgcaccgccgtgacgacgaccctggccggcagcgtggcggcgctcaccacgctgttcgggaagcggctccagacggggcactggaacgtggtcgacgtctgcaacggcctcctcggcgggttcgccgccatcaccgccgggtgcagcgtcgtcgacccgtgggccgcgatcatctgcgggttcgtctcggcgtgggtgctcatcggcctcaacgcgctcgccgcgcgcctcaagttcgacgacccgctcgaggccgcccagctccacggcgggtgcggcgcgtgggggatcctcttcaccgcgctcttcgcgaggcagaagtacgtcgaggagatctacggcgccggccggccgtacggcctgttcatgggcggcggcggcaagctgctcgccgcgcacgtcatccagatcctggtcatcttcgggtgggtcagctgcaccatgggacctctcttctacgggctcaagaagctcggcctgctccgcatctccgccgaggacgagacgtccggcatggacctgacacggcacggcgggttcgcgtacgtctaccacgacgaggacgagcacgacaagtctggggttggtgggttcatgctccggtccgcgcagacccgcgtcgagccggcggcggcggctgcctccaacagcaacaaccaagtgtag

SEQ ID NO: 794 - protein, 498 aa, Oryza sativa
  Oryza sativa (Rice)
MATCAADLAPLLGPVAANATDYLCNRFADTTSAVDATYLLFSAYLVFAMQLGFAMLCAGSVRAKNTMNIMLTNVLDAAAGALFYYLFGFAFAFGTPSNGFIGKQFFGLKHMPQTGFDYDFFLFQWAFAIAAAGITSGSIAERTQFVAYLIYSAFLTGFVYPVVSHWIWSADGWASASRTSGPLLFGSGVIDFAGSGVVHMVGGVAGLWGALIEGPRIGRFDHAGRSVALKGHSASLVVLGTFLLWFGWYGFNPGSFTTILKTYGPAGGINGQWSGVGRTAVTTTLAGSVAALTTLFGKRLQTGHWNVVDVCNGLLGGFAAITAGCSVVDPWAAIICGFVSAWVLIGLNALAARLKFDDPLEAAQLHGGCGAWGILFTALFARQKYVEEIYGAGRPYGLFMGGGGKLLAAHVIQILVIFGWVSCTMGPLFYGLKKLGLLRISAEDETSGMDLTRHGGFAYVYHDEDEHDKSGVGGFMLRSAQTRVEPAAAAASNSNNQV

SEQ ID NO: 795 - DNA, 1557 bp, Lotus japonicus
  CDS (1)..(1557)
atggcttctctctcttgctcagccacagacctcgctccactcttaaccgccacaaccaacgcaaccgcaaccgccgccgccacctacctctgcaaccagctcgatacaatctccaggaagctcagcgacaccacctatgccgttgacaacacctacctcctcttctcagcttatctagtcttcgccatgcagctcggttttgccatgctctgcgccggctccgtccgagccaaaaacaccatgaacatcatgctaaccaatgttcttgatgcagcagccggcggcctatcctactacctcttcggcttcgcgttcgccttcggagccccctccaacggcttcatcggccgccacttcttcggcctcaaacactacccttcgcccacctacgactacagcttcttcctctaccagtgggccttcgccatcgccgctgccggaatcaccagcggctccatcgccgagaggacacaattcgtcgcctacctcatctactcctctttcctaaccggctttgtctacccggtcgtctcgcactggctctggtcctcggacggctgggccagccccacccgcaccactggcagcttactattcggatccggcgcgattgatttcgctggatccggagtagtccacatggtcggtggcatagcaggactatggggcgcgttcatcgaaggccctagaatcggccggttcgaccgaaccggccgatccgtagccttacgtggacacagtgcgtccctagttgtcctcggttcgtttctactatggttcggttggtacgggttcaaccccggttcatttctcaccatagcaaaagcctacggtaacaacggcgaaaacggtaattactacggtcagtggagcgcgatagggagaacagcggtcacaaccacattggctggatgcactgcggcactcaccacgcttttcagcaaacggttattggagggccactggaaagtgcttgacgtgtgtaacggcctgctcggcggtttcgccgccatcacctccggttgctccgtcgtcgagccgtggccggcgattgtctgcggttttgtggcagcgtgggtgctgatcgggctcaatttggttgcggcgaaaatgaagtacgacgatcctctggaggcggcgcagcttcacggcgggtgcggcgcgtggggggttttattcacggggctgtttgcgaagggggagtacgtggcggaggtttacggcagcgctgggaggccgtacgggttgttaatgggtggcggagggaagttgctggcggcgcaggtgattgagatattggtggtgtgtgggtgggttacggcgacgatggggccgttgttctatgggcttcataagacgaaacttttgaggatttctgaagatgatgagactgcggggatggatttgacgaggcatggtgggtttgcttatgcttaccatgatgatgatgatgtgtccaccaagagaggggtcatgatgagtaggattgggcctggtagtagttctccctccaccatgaacacgccggcggcgagcgccgccgccaatgactgttga

SEQ ID NO: 796 - protein, 518 aa, Lotus japonicus
MASLSCSATDLAPLLTATTNATATAAATYLCNQLDTISRKLSDTTYAVDNTYLLFSAYLVFAMQLGFAMLCAGSVRAKNTMNIMLTNVLDAAAGGLSYYLFGFAFAFGAPSNGFIGRHFFGLKHYPSPTYDYSFFLYQWAFAIAAAGITSGSIAERTQFVAYLIYSSFLTGFVYPVVSHWLWSSDGWASPTRTTGSLLFGSGAIDFAGSGVVHMVGGIAGLWGAFIEGPRIGRFDRTGRSVALRGHSASLVVLGSFLLWFGWYGFNPGSFLTIAKAYGNNGENGNYYGQWSAIGRTAVTTTLAGCTAALTTLFSKRLLEGHWKVLDVCNGLLGGFAAITSGCSVVEPWPAIVCGFVAAWVLIGLNLVAAKMKYDDPLEAAQLHGGCGAWGVLFTGLFAKGEYVAEVYGSAGRPYGLLMGGGGKLLAAQVIEILVVCGWVTATMGPLFYGLHKTKLLRISEDDETAGMDLTRHGGFAYAYHDDDDVSTKRGVMMSRIGPGSSSPSTMNTPAASAAANDC

SEQ ID NO: 797 - DNA, 1233 bp, Bacillus cereus
  Bacillus cereus (strain ATCC 14579 / DSM 31)
  CDS (1)..(1233)
atgaatatgggagatacagtttttatgtttgtgacgacagtaatggtcatgttgatgacaccaggattggcacttttttatggaggtatggttcgcagcaaaaatgtactcagtacaacgatgcatagttatagtgcaatggctatcgtttcgattcaatggattgttatcggctattctttatcattcggaccagattggcacgggcttattggtacacttgattggttcggtctaaacggagttacctacgcaccaaatccagactactcatctactattcctcacaatttattcatgatgtttcaactcatgttcgccattttaactccagctttaatttcaggtgcatttgctgaaagaatgcgattttctgcctttcttatttttatccttttatggacaacgattgtttacaatcctgtcgctcattgggtatggggcgtcggcgggtggctaagggaatttggtgcactagacttcgctggcggaaacgtcgttcacatcacttccggagttgctggtcttgtattagctattttcctcggaaaacgaaaaaacataaatggttcttctcctcaccatttgccatttacaatgttaggcgcaggcttattatggtttggctggttcggttttaacgtcggcagcgcattatccttaaacgacgtagctttaactgcatttattaatacaaatatagccgctgctgcctcagcattaacttggatgctttcagagtggttcttccaatcaaaaccgactgcgatgggagctgcttgtggcgccgtttccggtctagtcgctattacaccagcttgcgggttcgttacacctttctcagctcttcttatcggagcaattggcggcgtattatgcttcggagcggtctttttcttaaaaacaaaattcggatacgacgatacactcgatgcattcggatgtcacggcatcggtggaacttggggcggtattgcgacaggattatttgcaactactgccgtaaacggcgatggcgctaacggattattttacggaaacgcctcgctgctgttgaaacaacttgtagcgatcggcgcaacatatgcgttcacaattataatgacgtatgccattattaaagcaatcaacttcttcctccctgtccgggtagatgagcacgaggaacatatgggacttgatatttcgatgcacggggagaaagcttatgagtatactgagcgagtgaactaa

SEQ ID NO: 798 - protein, 410 aa, Bacillus cereus
  Bacillus cereus (strain ATCC 14579 / DSM 31)
MNMGDTVFMFVTTVMVMLMTPGLALFYGGMVRSKNVLSTTMHSYSAMAIVSIQWIVIGYSLSFGPDWHGLIGTLDWFGLNGVTYAPNPDYSSTIPHNLFMMFQLMFAILTPALISGAFAERMRFSAFLIFILLWTTIVYNPVAHWVWGVGGWLREFGALDFAGGNVVHITSGVAGLVLAIFLGKRKNINGSSPHHLPFTMLGAGLLWFGWFGFNVGSALSLNDVALTAFINTNIAAAASALTWMLSEWFFQSKPTAMGAACGAVSGLVAITPACGFVTPFSALLIGAIGGVLCFGAVFFLKTKFGYDDTLDAFGCHGIGGTWGGIATGLFATTAVNGDGANGLFYGNASLLLKQLVAIGATYAFTIIMTYAIIKAINFFLPVRVDEHEEHMGLDISMHGEKAYEYTERVN

SEQ ID NO: 799 - DNA, 1311 bp, Streptomyces avermitilis
  CDS (1)..(1311)
atgaccctggccgccgcccggatcgacaccggcgacaccgcatggctgctcgccgccaccgcgctcgttctcctgatgacccccggcctggccctgttctacggcggcatggtccgcacgaagagcgtcctcaacatgctgatgatgagcttcgtgtcgatcgccctggtcacggtcgtgtggctggccgccggctactcgctcgcgttcggcgacgacctcgcgggcggactcatcggcggcctggaccacgccggcctggcggacctcggtcccgccgacgtccacggcacggtccccaccctcctcttcgccaccttccagctcaccttcgcgatcatcaccgccgccctcatcagcggcgccatcgcggaccgggcgaaattcgcggcctggctggtcttcgtccccctctgggcgctgctcgtatacgttcccgtcgcccactgggtgtggggccccggcggctggatcctcgaccgcctcggcgccctcgatttcgcgggcggactccccgtcgagatcacgtcgggcgcctcgggcctggccctgtgcctggtcctcgggccgcgcctcggcttcaagaaggacgccatgcgcccgcacaacctgccgatggtgatgctgggcgccggtctgctgtggttcggctggttcggcttcaacgcgggttcggcgctcggcgccaacggactggccgccgcggccttcctcaacacgctcgccgccggctgcaccggcctgctcggctggctcttcgtggagcagaagcgcgacggccacccgaccacgctgggcgccgcctccggcgcggtcgcgggcctggtcgccatcaccccgtcctgcggcgcggtctccctgctcggcgcgctggtcgtggggctcgccgccggtgtcgtctgctcgtacgccgtgggctggaagttcaagctgaactacgacgactcgctggacgtcgtcggcgtccacctggtcggcgggatcatcggcaccctgctgatcggggtcttcgcggccaaggagatgacgggcggcaccgagggcctgctctacggcggcgggctcggacagctcggcaagcagctggtggcggtcgtggccgtgggggcgtacgccttcgccgtcacctacggcctcgggaagctgatcgacaaggtcatgggcctgcgggcggccgaggacgacgagcaccagggcctggaccttacggtgcacgccgagaccgcttacgatcacgggattctggggcacggcgccccaagctccgcgtccgtcgtccccaccgcgcagaaggtcaagagccaggcatga

SEQ ID NO: 800 - protein, 436 aa, Streptomyces avermitilis
MTLAAARIDTGDTAWLLAATALVLLMTPGLALFYGGMVRTKSVLNMLMMSFVSIALVTVVWLAAGYSLAFGDDLAGGLIGGLDHAGLADLGPADVHGTVPTLLFATFQLTFAIITAALISGAIADRAKFAAWLVFVPLWALLVYVPVAHWVWGPGGWILDRLGALDFAGGLPVEITSGASGLALCLVLGPRLGFKKDAMRPHNLPMVMLGAGLLWFGWFGFNAGSALGANGLAAAAFLNTLAAGCTGLLGWLFVEQKRDGHPTTLGAASGAVAGLVAITPSCGAVSLLGALVVGLAAGVVCSYAVGWKFKLNYDDSLDVVGVHLVGGIIGTLLIGVFAAKEMTGGTEGLLYGGGLGQLGKQLVAVVAVGAYAFAVTYGLGKLIDKVMGLRAAEDDEHQGLDLTVHAETAYDHGILGHGAPSSASVVPTAQKVKSQA

SEQ ID NO: 801 - DNA, 1341 bp, Streptomyces avermitilis
  CDS (1)..(1341)
atggcaccagccatcacgcttgccgcagaggctcccaagctgtctgccgccaacacaggcttcatgctcatctgttccgccttggtactgatcatgaccccgggcctggccttcttctacggaggcatggtccgcgtcaagagcactctgaacatgctcatgatgagcttcatcagcatgggcatcgtcaccatcctgtgggtgctgtacggcttctcgctcgccttcggtaccgacaagggttcgctcatcggctggacgtccgacttcgtcggcttcaccgggatcggcaaggtggagctctggcccggttacaccattccggtctatgtcttcgccaccttccagctgatgttcgcgatcatcacgcccgccctgataagcggagccctggccgaccgcgtcaagttcaccgcctggtccctgttcgtcgccctgtgggccacggtcgtgtacttcccggtcgcgcactgggtgtggggcaccggtggctgggccttcgacctcggcgtgatcgacttcgccggtggtacggcggtccacatcaacgcgggtgccgcggcgctcggcgtcatcctggtcatcggcaaacgcgtcggcttcaagaaggacccgatgcgcccgcacagcctgccgctggtcatgctcggctgcggcctgctgtggttcggctggttcggattcaacgcaggctcgtggctcggcaacgacgacggtgtcggcgcgctgatgttcatcaacacgcagatcgccaccgccgctgcgatgctcgcctggctcgcgtacgagaagatccgccacggcgcgttcaccaccctcggtgccgcctccggcgcggtcgcgggcctggtcgccatcaccccgtccggtggcgcggtctccccgctcggcgcgatcgccgtcggcgccatcgccggtgtcctgtgcgccatggccgtgggcctgaagtacaagttcggctacgacgactccctcgacgtcgtcggcgtccacctcgtcggcggtgtcgcgggctccctgctcatcggcttcttcgccagcggcggcggccagtccgacgcgacgggcgtcttctacggcgaccactccttcgaccagctgtggaagcagtgcgccggagtcttcgcggtcctcgcctactccctggtcgtctccgcgatcctcgccttcctgatcgacaagacgatcgggatgcgggtttccgaggacgaggagatcgccggcatcgaccaggcggagcacgccgagaccgcatacgacttcagcggagcgggcggcggcgcggcccggatcctccccgcccctctcgcggacacggcgaccaagaaggtggacgcatga

SEQ ID NO: 802 - protein, 446 aa, Streptomyces avermitilis
MAPAITLAAEAPKLSAANTGFMLICSALVLIMTPGLAFFYGGMVRVKSTLNMLMMSFISMGIVTILWVLYGFSLAFGTDKGSLIGWTSDFVGFTGIGKVELWPGYTIPVYVFATFQLMFAIITPALISGALADRVKFTAWSLFVALWATVVYFPVAHWVWGTGGWAFDLGVIDFAGGTAVHINAGAAALGVILVIGKRVGFKKDPMRPHSLPLVMLGCGLLWFGWFGFNAGSWLGNDDGVGALMFINTQIATAAAMLAWLAYEKIRHGAFTTLGAASGAVAGLVAITPSGGAVSPLGAIAVGAIAGVLCAMAVGLKYKFGYDDSLDVVGVHLVGGVAGSLLIGFFASGGGQSDATGVFYGDHSFDQLWKQCAGVFAVLAYSLVVSAILAFLIDKTIGMRVSEDEEIAGIDQAEHAETAYDFSGAGGGAARILPAPLADTATKKVDA

SEQ ID NO: 803 - DNA, 1461 bp, Oryza sativa
  Oryza sativa (japonica cultivar-group)
  CDS (1)..(1461)
atggcggcggcgggggcgtactcggcgagcctaccggcggtgccggactggctgaacaagggggacaacgcgtggcagctgacggcgtcgacgctggtggggatccagtcgatgcccgggctggtggtgctgtacggcagcatcgtgaagaagaagtgggcggtgaactcggcgttcatggcgctctacgcctacgcgtcgtcgctgctggtgtgggtgctggtcggcttccgcatggcgttcggcgaccagctgctgccgttctggggcaaggccggcgtggcgctgacccagagctacctcgtcggccgcgccacgctgccggccaccgcgcacggcgccatcccgcgcaccgagcccttctacccggaggccacgctggtgctcttccagttcgagttcgccgccatcacgctcgtcctcctcgccggctccgtcctcggccgcatgaacatcaaggcctggatggccttcaccccgctctggctcctcctctcctacaccgtcggcgccttcagcctctggggcggcggcttcctctaccgctggggcgtcatcgactactccggcggctacgtcatccacctctcctccggcatcgccggcttcaccgccgcctactgggtggggccaaggctgaagagcgaccgtgagcggttctcaccgaacaacatcctgctgatgatcgcgggcggcgggctgctgtggatggggtgggccgggttcaacggcggcgcgccgtacgccgccaacatcgcggcgtcggtcgccgtgctcaacaccaacgtctgcgccgccaccagcctcctcatgtggacctgcctcgacgtcatcttcttccgcaagccgtccgtcatcggcgccgtgcagggcatgatgaccggcctcgtctgcatcacccccggcgcagggctggtgcagacctgggcggccgtggtaatgggcatcttcgccggcagcgtgccgtggttcaccatgatgatcctgcacaagaagtcagcgctgctgatgaaggtggacgacacgctcgccgtgttccacacccacgccgtggcggggctcctcggcggcatcctcacgggcctcctggccaccccggagctcttctccctcgagtccacggtgccgggactccgcggcgcgttctacggcggcggtatcaagcagatcggcaagcagctcggcggcgccgcgttcgtgatcgcgtggaacctcgtggtcaccacggccatcctcctcggcatcggcctgttcatcccgctgcggatgcccgacgagcagctcatgatcggcgacgacgcggcgcacggcgaggaggcctacgcgctgtggggcgacggcgagaagttcgacgcgacgcggcacgacctgtcgaggggcggcggaggcggcgacagggacggccccgccggcgagcgcctctccgccctaggcgccaggggcgtcaccatccagctctag

SEQ ID NO: 804 - protein, 486 aa, Oryza sativa
  Oryza sativa (japonica cultivar-group)
MAAAGAYSASLPAVPDWLNKGDNAWQLTASTLVGIQSMPGLVVLYGSIVKKKWAVNSAFMALYAYASSLLVWVLVGFRMAFGDQLLPFWGKAGVALTQSYLVGRATLPATAHGAIPRTEPFYPEATLVLFQFEFAAITLVLLAGSVLGRMNIKAWMAFTPLWLLLSYTVGAFSLWGGGFLYRWGVIDYSGGYVIHLSSGIAGFTAAYWVGPRLKSDRERFSPNNILLMIAGGGLLWMGWAGFNGGAPYAANIAASVAVLNTNVCAATSLLMWTCLDVIFFRKPSVIGAVQGMMTGLVCITPGAGLVQTWAAVVMGIFAGSVPWFTMMILHKKSALLMKVDDTLAVFHTHAVAGLLGGILTGLLATPELFSLESTVPGLRGAFYGGGIKQIGKQLGGAAFVIAWNLVVTTAILLGIGLFIPLRMPDEQLMIGDDAAHGEEAYALWGDGEKFDATRHDLSRGGGGGDRDGPAGERLSALGARGVTIQL

SEQ ID NO: 805 - DNA, 1440 bp, Oryza sativa
  Oryza sativa (japonica cultivar-group)
  CDS (1)..(1440)
atgtcgtcgtcggcgacggtggtgccgctggcgtaccaggggaacacgtcggcgtcggtggcggactggctgaacaagggcgacaacgcgtggcagctggtggcggcgacggtggtggggctgcagagcgtgccgggcttggtggtgctgtacggcggcgtggtgaagaagaagtgggcggtgaactcggcgttcatggcgctctacgccttcgccgccgtgtggatctgctgggtcacctgggcgtacaacatgtcgttcggggagaagctcctcccgatctgggggaaggcgcggccggcgctggaccagggcctcctcgtcggccgcgccgcgctgccggcgacggtccactaccgcgccgacggcagcgtggagacggcggcggtggagccgctgtacccgatggcgacggtggtgtacttccagtgcgtgttcgccgccatcaccctcatcctcgtcgccggctccctcctcggccgcatgagcttcctcgcctggatgatcttcgtcccgctctggctcaccttctcctacaccgtcggcgccttctccctctggggcggcggcttcctcttccactggggcgtcatcgactactgcggcggctacgtcatccacgtctccgccggcatcgccggcttcaccgccgcctactgggtggggccaagggcacagaaggacagggagaggttcccgccgaacaacatactgttcacgctgacgggggcagggttactatggatggggtgggcagggttcaacggcggtggtccgtacgccgccaactccgtcgcctccatggccgtcctcaacaccaacatctgcaccgccatgagcctcatcgtctggacatgcctcgacgtcatcttcttcaagaagccctccgtcgtcggcgccgtccagggcatgatcaccggcctcgtctgcatcacccccgctgcaggggtggtgcaggggtgggcggcgctggtgatgggggtgctcgccggcagcatcccgtggtacaccatgatgatcctccacaagcgctccaagatcctgcagcgcgtcgacgacaccctcggcgtcttccacacccacggcgtcgccggcctcctcggcggcctcctcaccggcctcttcgccgagcccaccctctgcaacctcttcctccccgtcgccgactcccggggcgccttctacggcggcgccggcggcgcccagttcggcaagcagatcgccggtggcctcttcgtcgtcgcctggaacgtcgccgtcacctccctcatctgcctcgccatcaacctcctcgtcccgctccgcatgcccgacgacaagctcgaggtcggcgacgacgccgtccacggcgaggaggcctacgcgctctggggcgacggcgagatgtacgacgtcaccaagcacggctccgacgccgccgttgcgcccgtcgtcgtatag

SEQ ID NO: 806 - protein, 479 aa, Oryza sativa
  Oryza sativa (japonica cultivar-group)
MSSSATVVPLAYQGNTSASVADWLNKGDNAWQLVAATVVGLQSVPGLVVLYGGVVKKKWAVNSAFMALYAFAAVWICWVTWAYNMSFGEKLLPIWGKARPALDQGLLVGRAALPATVHYRADGSVETAAVEPLYPMATVVYFQCVFAAITLILVAGSLLGRMSFLAWMIFVPLWLTFSYTVGAFSLWGGGFLFHWGVIDYCGGYVIHVSAGIAGFTAAYWVGPRAQKDRERFPPNNILFTLTGAGLLWMGWAGFNGGGPYAANSVASMAVLNTNICTAMSLIVWTCLDVIFFKKPSVVGAVQGMITGLVCITPAAGVVQGWAALVMGVLAGSIPWYTMMILHKRSKILQRVDDTLGVFHTHGVAGLLGGLLTGLFAEPTLCNLFLPVADSRGAFYGGAGGAQFGKQIAGGLFVVAWNVAVTSLICLAINLLVPLRMPDDKLEVGDDAVHGEEAYALWGDGEMYDVTKHGSDAAVAPVVV

SEQ ID NO: 807 - DNA, 1455 bp, Xylella fastidiosa
  Xylella fastidiosa (strain Temecula1 / ATCC 700964)
  CDS (1)..(1455)
atgcactctaactcttgccattttagtgatatgaagaatggttttttcgcaatctgtatatttatcgcgttggctttgttggcaggtggcaatgccatcggtcgtgcggaggctcaggtacaaaccaatcctttgcctagcgagcaagtcaccaccgaattgttgatgtctgaagcaaccccttccgacgcggttgcaatacctaaaacgacttcaccccccgtggtagacaagggggacgttgcttggatgctcacctcaacgctattagtgctactgatggtgttaccaggcttggcactgttttacggcggcatgttgcgttctaaaaacgtactatcaatgatggtacaaattggtgtggtgttttctctgatagccatcttgtgggtgctatacggctatagccttgcttttgctgatggtgacatgtttattggtacattcaataaggcatttctttatggcgtagacactgcaacgttggtagataccttctctaaagggttcaaactgcccgagtacgtgtacgttgctttccaattgacttttgcaggtatcaccgctgcattgattgtcggtgcttttgcagaacgcgtgaaatttgctgcggtactgctgtttattttcatttggttttccttcggctacctgccactggcacacatggtgtggtcgacgccaggttttctgttgagcaagggggccttggattttgccggtgggacagttgtacatatcaatgctggtattgctggattgatcggtgcttactttgttggtaagcgtattggttttggccaggttgccgtcaagccgcataacgtccccatgactttcactggtgctgcactgctatgggtcggttggttcggcttcaatgctggttcggcgttagaagccaatagcattgctgccttggctttcatcaacaccatgcttgcgactgctgctgcgattctcgtttggtcgttgctcgaaaagatgaccaagggaaaattctcagctctgggtgttgcttcaggcatgattgctggtttagtaggcgtcactccagcggcgggtacggttggtccatttggtgcaattgcgattggtgctgttgccgccgtgtgctgtatctggggcatcactggactgaaaagattattgaaggtagacgataccttggacgtattcggcgtgcatggcattggcggcattgttggtgcgattttgactggggtttttaccgataaggcgctaggcggtcagggatatgctgaggggatgacaatgagcaatcaagtcatgattcaagccatgagtgtggggatcagcatcgtgtggattggaatcgtttcgctggtaggtttcttaattgtcaaactgctgtttggtttgcgtgtaagcgaagaagctgaacgtgaaggattggacattacatcgcacggtgagtcggcgtacgagtcctga

SEQ ID NO: 808 - protein, 484 aa, Xylella fastidiosa
  Xylella fastidiosa (strain Temecula1 / ATCC 700964)
MHSNSCHFSDMKNGFFAICIFIALALLAGGNAIGRAEAQVQTNPLPSEQVTTELLMSEATPSDAVAIPKTTSPPVVDKGDVAWMLTSTLLVLLMVLPGLALFYGGMLRSKNVLSMMVQIGVVFSLIAILWVLYGYSLAFADGDMFIGTFNKAFLYGVDTATLVDTFSKGFKLPEYVYVAFQLTFAGITAALIVGAFAERVKFAAVLLFIFIWFSFGYLPLAHMVWSTPGFLLSKGALDFAGGTVVHINAGIAGLIGAYFVGKRIGFGQVAVKPHNVPMTFTGAALLWVGWFGFNAGSALEANSIAALAFINTMLATAAAILVWSLLEKMTKGKFSALGVASGMIAGLVGVTPAAGTVGPFGAIAIGAVAAVCCIWGITGLKRLLKVDDTLDVFGVHGIGGIVGAILTGVFTDKALGGQGYAEGMTMSNQVMIQAMSVGISIVWIGIVSLVGFLIVKLLFGLRVSEEAEREGLDITSHGESAYES

SEQ ID NO: 809 - DNA, 1326 bp, Pseudomonas syringae
  Pseudomonas syringae (pv. tomato)
  CDS (1)..(1326)
atggtcaatcgtctacacggcaaatccctactggctttactgactctcagtgccttggcgccctgggcgcaggcggccgaaacgccagtcctgaacaccggcagcaccgcatggatgatcaccgcagcagtcctggtgctgttcatgtgccttccggggctggcactgttctacggcggactggtgcgggccaaaaacatgctctcgctgttcacgcagtgttttggcatcgccggtgtagtcggcgtgctatgggtgatctacggctacagcatggtggttgacaccagcaacatggtcgaagggcaggtaacgttcaacagcttcgtcggtggcctgagtcgcgcctttctggcgggcatgacccccgatagcctggtcggtgaaatcccggaaggcgtgttcgtgaccttccagatgaccttcgccatcatcacgcctgcactgattgccggagcctttgccgagcgcatgaaattctctgccgcgctgctgttcatggcgctctggttcaccttggtgtatgcgccggtcgcgcacatggtctggggcggggcgggtgcgttgatgcacaactggggcgtgctggattttgccggtggcactgcggtgcacatcaatgccggtgttgcagcattggcagcctgtctggtgctgggcaaacgcaagggttatcagaacacacccatgccggctcataatctgagcctgaccatggccggcgcggcgatgctctgggtcggctggttcggcttcaacatcggctctggcggcggcctgagcggcacttccggcatcgtcatgcttaacacccaagtgggtgcctgcgccgggattctcggctggatgttcaccgaatggttcaaggtcggcaaaccgagtgcactgggcctggccagtggtgcgctggccggtctggtcggcatcacgcctgcctgtgcttacgtcggcgtcggcggcgcgttggcgattggtgtcctgtgcggagtgttctgctacctgagcgtgaccgtcctgaaaaaacgcctgggctacgacgacagcctcgatgtcttcggcctgcacggcatcggcggcatgatcggcgcggtactcaccggcgtcttctgcgtaccggcactgggcgggctggtgccagaggtgaccatgggtgcgcaagtcattgcacaggtcaaaggcgtgctcttcaccaccgtgtattgctttgcggtcagctggatcatcctcaaagcagtcaacgcactgatcggcctgcgggctcacgagtcagtagaagagatgggcctggacctggccgagcataatgagcgggcttacaaccactga

SEQ ID NO: 810 - protein, 441 aa, Pseudomonas syringae
  Pseudomonas syringae (pv. tomato)
MVNRLHGKSLLALLTLSALAPWAQAAETPVLNTGSTAWMITAAVLVLFMCLPGLALFYGGLVRAKNMLSLFTQCFGIAGVVGVLWVIYGYSMVVDTSNMVEGQVTFNSFVGGLSRAFLAGMTPDSLVGEIPEGVFVTFQMTFAIITPALIAGAFAERMKFSAALLFMALWFTLVYAPVAHMVWGGAGALMHNWGVLDFAGGTAVHINAGVAALAACLVLGKRKGYQNTPMPAHNLSLTMAGAAMLWVGWFGFNIGSGGGLSGTSGIVMLNTQVGACAGILGWMFTEWFKVGKPSALGLASGALAGLVGITPACAYVGVGGALAIGVLCGVFCYLSVTVLKKRLGYDDSLDVFGLHGIGGMIGAVLTGVFCVPALGGLVPEVTMGAQVIAQVKGVLFTTVYCFAVSWIILKAVNALIGLRAHESVEEMGLDLAEHNERAYNH

SEQ ID NO: 811 - DNA, 1338 bp, Pseudomonas syringae
  Pseudomonas syringae (pv. tomato)
  CDS (1)..(1338)
atgactctgcgtcaattcgcagggctcggtgccctgttgtccctcgcaatacctggtcttgccctggcggctgacccagtggccgagccggtgctgaactctggcgacaccgcatggatgctgaccgcgaccgctctggtcctgttcatgaccattcccggtctcgcgctgttctacggcggcatggtccgttcaaaaaacatcctgtccgtgatgatgcagtgtttcgccatcaccggcctgatcagcatcctgtgggtcgtttacggttacagcatcgcgtttgacacaaccggtatggaagctggcgtcgtcaacttcaattccttctttggcggtatgggtaaagcgttcctggcgggtatcacgcctgcaagccttaccggtcctgctgcattgttccctgaggcggtgttcgtcacctttcagatgacctttgcgatcatcactccagccctgatcgtcggtgctttcgcagaacgcatgaagttctccgcgatgctgattttcatgggtatctggttcacgctggtctacgcgccaattgcccatatggtctggggcggcgtcggtggcttgatgtgggactggggcgttctggacttcgcaggtggcaccgtggtgcacatcaacgccggtgtagccggtctggtggcttgcctggtactgggcaagcgcaaaggcttcccgaccaccccgatggctccgcacaatctgggttacaccctgatcggcgcagcgatgctctgggttggctggttcggtttcaacgccggttccgccgctgcggccaacggcactgccggtatggcgatgctggtgacgcaaatcgctaccgctgccgccgcgctgggctggatgttcgccgagtggctgacgcacggtaagccaagtgcgctgggcatcgcttcgggtgtggttgccggtctggttgccatcaccccggcggccggtacagttggcccgatgggcgcgctgatcatcggtctggcggcaggcgtgatctgcttcttctgcgccaccagcctcaagcgcaagcttggctacgatgactccctggatgcgttcggcgttcacggtatcggcggtatcgtcggcgcgatcctgaccggtgtgttcgcagcacctgcactgggcggcttcggcacggtgactgacatcggtgctcaagtctggattcagttcaagggcgtcgcgttcaccgtcgtctacaccgcgatcgtgaccttcatcatcctcaaggtactggatgcagtgatgggtctgcgggttaccgacgaggaagagtctgtcggtctggaccttgcgcaacacaacgagcgtggctacaacttgtaa

SEQ ID NO: 812 - protein, 445 aa, Pseudomonas syringae
  Pseudomonas syringae (pv. tomato)
MTLRQFAGLGALLSLAIPGLALAADPVAEPVLNSGDTAWMLTATALVLFMTIPGLALFYGGMVRSKNILSVMMQCFAITGLISILWVVYGYSIAFDTTGMEAGVVNFNSFFGGMGKAFLAGITPASLTGPAALFPEAVFVTFQMTFAIITPALIVGAFAERMKFSAMLIFMGIWFTLVYAPIAHMVWGGVGGLMWDWGVLDFAGGTVVHINAGVAGLVACLVLGKRKGFPTTPMAPHNLGYTLIGAAMLWVGWFGFNAGSAAAANGTAGMAMLVTQIATAAAALGWMFAEWLTHGKPSALGIASGVVAGLVAITPAAGTVGPMGALIIGLAAGVICFFCATSLKRKLGYDDSLDAFGVHGIGGIVGAILTGVFAAPALGGFGTVTDIGAQVWIQFKGVAFTVVYTAIVTFIILKVLDAVMGLRVTDEEESVGLDLAQHNERGYNL

SEQ ID NO: 813 - DNA, 1332 bp, Pseudomonas putida
  Pseudomonas putida (strain KT2440)
  CDS (1)..(1332)
atgactctgcgtaagatcgcagggctaggagccctattgtccctcgtaatgcccgggcttgccctggcagaggaagctgccccagcgcttaattccggcgacaccgcctggatgctgaccgcaacggcgctggtgctgttcatgactattccgggcttggccctgttctatggcggcatggtgcgatccaagaacgtgctgtcggtgatgatgcagtgctttgcaatcaccggcctgatgagcattctctgggtcgtctacggctacagcatggccttcgataccgccggtatggaaaagggcgtgctcaacttcaactccttcgttggcggcttctccaaggccttcctcagcggtgtcacgcccgacagcctgacctcggccaccgcgctgttccctgaagcggtgttcatcaccttccagatgacgttcgccatcatcaccccggcgttgatcgtcggtgcctttgccgagcgcatgaagttctcggcgatgctcgtattcatgggtatctggttcaccctggtgtatgcgccgatcgcacacatggtgtggagcggtgacggtgccctgatgtgggactggggcgtactggacttcgctggcggcaccgtggtgcacatcaacgccggtatcgcaggcctggtctgctgcctggtactgggcaagcgcaagggctacccgaccacgccgatggccccgcacaacctcggctataccctgatgggcgcagcgatgctgtggatcggctggttcggtttcaacgcaggctctgctgctgccgccaacggtactgccggcatggccatgctggtcactcagatcgctaccgccgccgccgccctgggctggatgttcgccgagtgggtcggtcacggtaagccaagtgctctgggcatcgcttcgggcgtggttgctggcctggtcgccatcaccccggctgcgggcaccgtcgggccgattggcgcgctgatcatcggcctggtttcgggtgtgctctgctacttctgcgccaccacgctcaagcgcaaactcggctatgacgattcgctggatgccttcggcgtgcacggtgttggcggcatcatcggtgccatcctcacgggtgtattcgcggctccggcgctgggcggcttcggtaccgtcaccgacatcggcatgcaagtctggatccaggccaaaggtgtgattttcaccgtggtctacaccgccatcgtcacctacgtgattctcaaggtgctggatgtggtgatgggcctgcgggtcaacgaagaagaagagtcggtcggcctcgacctggctcagcacaacgagcgcggctacaacctgtaa

SEQ ID NO: 814 - protein, 443 aa, Pseudomonas putida
  Pseudomonas putida (strain KT2440)
MTLRKIAGLGALLSLVMPGLALAEEAAPALNSGDTAWMLTATALVLFMTIPGLALFYGGMVRSKNVLSVMMQCFAITGLMSILWVVYGYSMAFDTAGMEKGVLNFNSFVGGFSKAFLSGVTPDSLTSATALFPEAVFITFQMTFAIITPALIVGAFAERMKFSAMLVFMGIWFTLVYAPIAHMVWSGDGALMWDWGVLDFAGGTVVHINAGIAGLVCCLVLGKRKGYPTTPMAPHNLGYTLMGAAMLWIGWFGFNAGSAAAANGTAGMAMLVTQIATAAAALGWMFAEWVGHGKPSALGIASGVVAGLVAITPAAGTVGPIGALIIGLVSGVLCYFCATTLKRKLGYDDSLDAFGVHGVGGIIGAILTGVFAAPALGGFGTVTDIGMQVWIQAKGVIFTVVYTAIVTYVILKVLDVVMGLRVNEEEESVGLDLAQHNERGYNL

SEQ ID NO: 815 - DNA, 1317 bp, Lactobacillus plantarum
  CDS (1)..(1317)
atgaacgctgcaaattcaacgtttttagtgttatctagtatattggtattattcatgacgcccggattagcatttttctacggtggcttagtttccaaacggaatgtcgttaacaccatgttatccgtcttcatgatttgtggcttagcaatcttgttatggctcgcattcggttattcactatctttttccggtgatttaggtggctttgtcggtaatctcaaagccacttggttgcatggtgtggacttgaccgcgcttaccgcgacaaagattcccaacggtttatatctcatctttcaaatgatgtttgccattatcacgccagcactatttgttggcgcggtggtcggccgtatccgttttaaattcttattaaccttcatcatcttctggtcactcctcatctactatccaatggttcatatggtttgggataacggtttattagctaaacttggcgtcatcgacttcgctggtggcaccgtcgtccacatcaatgccggcatcaccgctttagtcttatcagccttcttaggtgcccgccacaagtatggcaaggatatgacccagcactataacatcttatgggtattgctggggaccgctattttatggatcggctggtacggtttcaatgccggttcggcgcttgccatgaacgacatcgccatccaagccttcttaaccacgaccgttgccaccgccacttccatgatgacgtggatggtcgttgatatgctaaccaagggcaaaccaaccctagtcggtgtctgcaccggtaccctttgtggtctcgttgcgattacacctgcttgtggctacgtcaccatttctggcgccttttggattggccttatcgccacattaaccagttacggcttcattacgttcatcaaaccacgcttaggtatcgatgatgcactcgatgcctttggatgccacggtgtttccggcatggtcggcagtatcatgactgggctattcgctagcaaagccgttaatcgcacaatttctctaaacggtcttttctatggtggcggctttaaattattcggattacaactattagcaacgatctttaccattggctttactaccatcgtttgcatcgtcattatcgtactattgaaacgagtcatcagaatgcgcgttgacgagcgagaggaagaactcggactcgatcaaggcgaacacggcgaagtcgctgactacaccgttcaaatgagtcacgacttgacgaacattcaacaccatagcgatgaatttcgtggtcagttagcgcaactgctagataagcaacaacgattccgataa

SEQ ID NO: 816 - protein, 438 aa, Lactobacillus plantarum
MNAANSTFLVLSSILVLFMTPGLAFFYGGLVSKRNVVNTMLSVFMICGLAILLWLAFGYSLSFSGDLGGFVGNLKATWLHGVDLTALTATKIPNGLYLIFQMMFAIITPALFVGAVVGRIRFKFLLTFIIFWSLLIYYPMVHMVWDNGLLAKLGVIDFAGGTVVHINAGITALVLSAFLGARHKYGKDMTQHYNILWVLLGTAILWIGWYGFNAGSALAMNDIAIQAFLTTTVATATSMMTWMVVDMLTKGKPTLVGVCTGTLCGLVAITPACGYVTISGAFWIGLIATLTSYGFITFIKPRLGIDDALDAFGCHGVSGMVGSIMTGLFASKAVNRTISLNGLFYGGGFKLFGLQLLATIFTIGFTTIVCIVIIVLLKRVIRMRVDEREEELGLDQGEHGEVADYTVQMSHDLTNIQHHSDEFRGQLAQLLDKQQRFR

SEQ ID NO: 817 - DNA, 1533 bp, Bradyrhizobium japonicum
  CDS (1)..(1533)
atgcggttcgtatccgcaccggcgaggccgatgccgcggccctttgatttcgcgctcaaccttatccaatcaggagtaaataatatgacgttcaagcgtccctatggcgcgggattggcggctctcgcagtcggcctgttcgctgcgaccgcagcctatgccgagccaacggtcaataagggagacaacgcctggatgctgacatcgacagtcctcgtgctgttgatgacgatcccgggtcttgcgctgttctacggcggtctcgtccgttccaagaacatgctctcggtcttgatgcaggtcttctacaccgtctgcgtcgtcaccgtgatctgggccgtgtacggctacagcctcgccttcaccggcggttccgacttcatcggcggcttctccaaggccttcatgatgggcgtcaccaccgactcgaaggccgcgaccttctcggtcgacgccaacatctcggagctcatctatatgtgcttccagatgaccttcgcggcgatcacgccggccctcatcgtcggcgccttcgccgagcgcatgaagttctcggcgatcgctctcttcatcccgctctgggtcacgctgatctacttcccgatcgcgcacatggtctggtactggcccggcccggacgcgatccaggacgctgccaaggctctggctgcggcgactgatgcggcggcgaagaccgcggcgcaggccaagctcgacgagatcaacgccgacgccggctggatcttcaagaagggcgcgatcgacttcgcgggcggcaccgtggtgcacatcaacgccggcatcgcaggtctcgtcggcgctctcctgatcggcaagcgcaccggctacggcaaggagctgatggctccgcactcgctgaccatgtcgatgatcggcgcctcgctgctctgggtcggctggttcggcttcaacgccggctccaacctcgaagccaacggcggcgctgccctcgccatgaccaactccttcgtcgccaccgcagccgccgcgctgtcgtggatgttcgcggagtggatcgtgaagggtcacccgtcggtgctcggcgtcatctccggcgctgtcgcgggtctcgtggccgtcacgcccgccgccggcttctccggcgtcatgggtgcgatcgtcctcggtctcgtggtcggcgtggtctgcctgttcttctgcaccgtcgtgaagaacgcgatcggctacgacgactccctcgacgtgttcggcgtgcactgcatcggcggcatcgtcggtgctctcggtaccggcatcctggtgaaccccgccctcggcggcgccggcatcatcgactacaccgcgatcccgccgaaggttgccgattacgacttcgcggcgcagatggtgtcccagttctggggcgtctgcaccacgctggtgtggtcgggcatcggttcggcgatcctctacaaggtcgtcgatgtgatcgttggcctccgcgccaatgtcgagagcgagcgtgaaggcctcgacatcaccgagcacaccgagcgcgcctacaacatgtaa

SEQ ID NO: 818 - protein, 510 aa, Bradyrhizobium japonicum
MRFVSAPARPMPRPFDFALNLIQSGVNNMTFKRPYGAGLAALAVGLFAATAAYAEPTVNKGDNAWMLTSTVLVLLMTIPGLALFYGGLVRSKNMLSVLMQVFYTVCVVTVIWAVYGYSLAFTGGSDFIGGFSKAFMMGVTTDSKAATFSVDANISELIYMCFQMTFAAITPALIVGAFAERMKFSAIALFIPLWVTLIYFPIAHMVWYWPGPDAIQDAAKALAAATDAAAKTAAQAKLDEINADAGWIFKKGAIDFAGGTVVHINAGIAGLVGALLIGKRTGYGKELMAPHSLTMSMIGASLLWVGWFGFNAGSNLEANGGAALAMTNSFVATAAAALSWMFAEWIVKGHPSVLGVISGAVAGLVAVTPAAGFSGVMGAIVLGLVVGVVCLFFCTVVKNAIGYDDSLDVFGVHCIGGIVGALGTGILVNPALGGAGIIDYTAIPPKVADYDFAAQMVSQFWGVCTTLVWSGIGSAILYKVVDVIVGLRANVESEREGLDITEHTERAYNM

SEQ ID NO: 819 - DNA, 1251 bp, Staphylococcus epidermidis
  CDS (1)..(1251)
atgaatatgaatgatacaatatttctatttttatgtactctattagtatggttaatgacaccaggtttgagccttttttatgggggactcgtacaatcaaaaaatgctttaaatactgtaatgcaaagtatggttgccattgtcattgtcacatttatatggataatgattggtttctctttaagttttgatggaggtaatcaatggataggtggtttgaaatttttgggtcttcatcatgttggttttgaaacttcaaaaactttgagtcctcatatacctctctcattatttatgttgtttcaaatgatgttttgtacaattgcggtatctattttatcaggttcgatagccgagaaaatgagattcattccttatctgatttttgtgagtttatgggttctattaatttatagccctgttgcccactgggtatggggtggtggttggattagtaaaattggagcaatagattatgcgggtggaacagtagttcatataacatcaggtgtatctggtttggttcttgggataatgataggtataggtaaaaagaaagaaaaacatactccccataatctattaattacacttataggtggtatattagtatggttaggatggtatggatttaatgtgggcagtgcatttacattcgatcacatagccatgatatcgtttgtaaatacagttattggtgcaagtgcaggtgctttcggttggttaatctttgaatatatcttgaaaaagactacaagtttactaggtcttttatctggagcgctctctggtcttgtcgctattacaccagcagcaggatacgtcagctatatgagtgccatgattattgcaataatgggtggcataggttgctatatcgttataaatttaattaaagtaaaactccaatataatgatgcactagatgcatttggtattcatggtgtaggtggtatcttaggagctgtgtttacaggagtttttcaatcacatcaaattaatagtgcggtggagaatggttttatctatacaggtgattttaaaatagtagtgattcaacttggagcggcaattgcgactgtcgtttttagcgcaatagtcacttttttgattgctagatttattaaaatttttactcctttagctacaactcaagaagaagataaaacaggactcgatgttatagtacacggtgagaaagcgtatttctatggagagctaaataagtttaatcgtcatattaagttttaa

SEQ ID NO: 820 - protein, 416 aa, Staphylococcus epidermidis
MNMNDTIFLFLCTLLVWLMTPGLSLFYGGLVQSKNALNTVMQSMVAIVIVTFIWIMIGFSLSFDGGNQWIGGLKFLGLHHVGFETSKTLSPHIPLSLFMLFQMMFCTIAVSILSGSIAEKMRFIPYLIFVSLWVLLIYSPVAHWVWGGGWISKIGAIDYAGGTVVHITSGVSGLVLGIMIGIGKKKEKHTPHNLLITLIGGILVWLGWYGFNVGSAFTFDHIAMISFVNTVIGASAGAFGWLIFEYILKKTTSLLGLLSGALSGLVAITPAAGYVSYMSAMIIAIMGGIGCYIVINLIKVKLQYNDALDAFGIHGVGGILGAVFTGVFQSHQINSAVENGFIYTGDFKIVVIQLGAAIATVVFSAIVTFLIARFIKIFTPLATTQEEDKTGLDVIVHGEKAYFYGELNKFNRHIKF

SEQ ID NO: 821 - DNA, 1236 bp, Streptococcus mutans
  CDS (1)..(1236)
atggattcaggatctatagcatttattatcatttgttctgcgcttgtttttttaatgacaccgggtttagcctttttctatggaggcttgggacgccgcaagaatgtcatcaatacaatgatgatggcagttgtgccacttgctttggcctcgcttttgtgggtagttgtaggttattccttatcttttagtggtgttggaaaagtatttggtgatttttcacatgtctttttgaatggtgtgaaggaaggagcaagtagtagagggttaacaataccagataccttattttctggttttcaaatgatgttttctatcattacagtagctattttgacaggtgctgttgcaggaaggatgcgtttcactcctttagttatttttattatcttttggttacttttagtctattatccttttgcacacatggtttgggatgatggtctattagcaaaatgggggacgcttgattttgccggtggtgatgttgtccacattacatcaggcgtttcggggctggtattagccttggtagtcggtaaacgtcgcgattatgaccgtctggaatatcgtccacataatattccctttgttcttttgggagcaggcctactctggtttggttggtttgggtttaatgcaggttccgctttagctgctaatggtttggctgttcatgctttgttgacaactcatatttcagctgccgctgctatgttctcatggctgctacttgaaaaatatttaaatggtaaaccttccttagtaggcggttcaactggtttagtcgcaggcttagttgccattacaccaggtgcaggctttgtacccttatggagctctttgttgataggactcatggttagtcctctatgttattttgctatcgctgtgttgaaaagtaaatttggttatgatgatgccttggatgcttttggctgtcatggtataggtggtattttcggagggattgtaacaggactttttacaacacctcatctggctttagataaatccaatattggtcttatttatggtaatgcaagattatttttagttattctggcagctattctttttacgattatttggtcagctctgattagttttttaattataaaagttatttcccttttcatgccaattcgtgtcagtgatagagaagaagctactggacttgacgacaaagagcatggagaaactgcgtatccaacctttatgggacttgattcttag

SEQ ID NO: 822 - protein, 411 aa, Streptococcus mutans
MDSGSIAFIIICSALVFLMTPGLAFFYGGLGRRKNVINTMMMAVVPLALASLLWVVVGYSLSFSGVGKVFGDFSHVFLNGVKEGASSRGLTIPDTLFSGFQMMFSIITVAILTGAVAGRMRFTPLVIFIIFWLLLVYYPFAHMVWDDGLLAKWGTLDFAGGDVVHITSGVSGLVLALVVGKRRDYDRLEYRPHNIPFVLLGAGLLWFGWFGFNAGSALAANGLAVHALLTTHISAAAAMFSWLLLEKYLNGKPSLVGGSTGLVAGLVAITPGAGFVPLWSSLLIGLMVSPLCYFAIAVLKSKFGYDDALDAFGCHGIGGIFGGIVTGLFTTPHLALDKSNIGLIYGNARLFLVILAAILFTIIWSALISFLIIKVISLFMPIRVSDREEATGLDDKEHGETAYPTFMGLDS

SEQ ID NO: 823 - DNA, 1371 bp, Oceanobacillus iheyensis
  CDS (1)..(1371)
atgttgaagaaaagttttcttatatttacagcactgttacttttagctactccagtttacgcagcgacacctacacctgaatcgttagagctttctgttaacctaatttgggtaatgcttggtgcgtttttagtattttttatgcatgcaggatttgctatggtagagtctggctttactagatccaaaaataccttaaatatcttgatgaagaatttcttaacaataagtgttgcatctatattatttttcttagtaggttatggtattatgttcggttcttctgccggatccattataggtagtgacggatttttactaagcgaaattagcgaaatagactttttcgtatttcaagctatgtttgttgccacttgtgcaacaattatatctggagctgtagcagaacgaattaaattaggtagttatatccttattgttgcggcaatgaccacaatcatatatccagttgttggacattgggtgtggcaaggtgatggatggttaacctcactaggatttagtgacttcgcagggtctactgtagttcacctaacaggtgctgtgggagctttcgtagtagtactaatactcggtcctcgtatcggaaaatacaaagggaagaaagttaatgttatccaaggccataatttacctttaggagctctaggtgtttttatcctttggttaggttggttcggctttaacggtggcagtactttagctgctgacccatcactagtaccatatgtaattggaacaaccttattatctacttctgccgcattagtgtcatcctctttatatacaaaattacgatttaagaaagtagatgcatcattatccatgaatggtgtactgggtggattagtaggtattactgcaggtgccgcagaaatttctcttgggggatcaattattgtcggtctaatttctggtgtagtacttgtagaaggaattcgattcttagatacaaaattacgtatagacgacccagttggagctattgcagtacatggaatttgtggtatatggggaacattagccataggattgttctctgttaataccggacttttctacggaaatggtatttctcaattggggattcaagccatcggtgtacttgctgtagttgcttgggttgctattacagctggtgggttcacttatgtgataaataaaatatctcaaattcgcgtttcagaagaagaagaaatttctggacttgattttgcagaacacggatctagtgcatataattttaaagagagtttacttgaaggaacggacaataattcatcaagtggtcttgcagaacgtttaaataataatattccgattggtaaaacaagtaaccaaagttcttaa

SEQ ID NO: 824 - protein, 456 aa, Oceanobacillus iheyensis
MLKKSFLIFTALLLLATPVYAATPTPESLELSVNLIWVMLGAFLVFFMHAGFAMVESGFTRSKNTLNILMKNFLTISVASILFFLVGYGIMFGSSAGSIIGSDGFLLSEISEIDFFVFQAMFVATCATIISGAVAERIKLGSYILIVAAMTTIIYPVVGHWVWQGDGWLTSLGFSDFAGSTVVHLTGAVGAFVVVLILGPRIGKYKGKKVNVIQGHNLPLGALGVFILWLGWFGFNGGSTLAADPSLVPYVIGTTLLSTSAALVSSSLYTKLRFKKVDASLSMNGVLGGLVGITAGAAEISLGGSIIVGLISGVVLVEGIRFLDTKLRIDDPVGAIAVHGICGIWGTLAIGLFSVNTGLFYGNGISQLGIQAIGVLAVVAWVAITAGGFTYVINKISQIRVSEEEEISGLDFAEHGSSAYNFKESLLEGTDNNSSSGLAERLNNNIPIGKTSNQSS

SEQ ID NO: 825 - DNA, 1293 bp, Leptospira interrogans
  CDS (1)..(1293)
atggggataggaatgattatgaaatggaccaagagactgctcttattgctcaccctacttcttccatttgttttatttgggcaagaagctagcactcccgtagcggacaaaggagatacggtctggatgattgtagcatccgccctcgtattttttatgatacctgggcttgcattgttttatggaggtcttgtaagatctaaaaacgttctttcgactatgatgcatagttttgtagcaatcttagttttgaccctgcagtggaccatctttggatatagtttcgctttttccggaaccaatccttatttcggaaactttgatcttgcctttctaaatggaatcgatgaaaacactttagaattaacaattcctaaatatattcactttctttttcaaggtatgttcgcattaatcacacccgccttaatttctggagcaattgcagaaagagtaaaattcggcggttatataatttttattcttctttggtccactcttgtttatgatccagttgcacattgggtttgggcggcagacggttggctttttaaaatgagcgctttagattttgctggtggaaccgtagttcatcttatctcaggaattgcaggtcttgcagccgcaatcgttctgggtaaaagaaaaggagaaggacccgctctgatcgctcccaacaatcttacttatactttaatcggagccggtttactttggttcggttggttcggttttaacgctgggtccggacttgcggtaaacggaattaccgccagagcatttttagttactttaatcgcacctgcagccgcaggagttgcttggcttgtaatcgaatatttccatactaaaaaagcaaccgccctcggagccgcttcgggtattgtggccggtttggttgtaattactcccgcttctggttttgtaggagttcaaggagcaatcatcatgggacttcttgtaagtccggtatgctacgcagcgattcttttaaaaggaaaactaggatacgatgatagtttggacgcatttggaattcacggcgtaggtggtgcgttaggcgcggttcttacaggagttttcactcttacactcggcgcaggtgttgcgagtaaaggagatcaaattttggttcaactcattagcgtcgctgcaaccggagcttattcttttatcgtttctatgattctagtatttttgatcgataaaacaatcggctttcgtatttccgaagaaaaagaaattactggactggattcggaaattcacggagaaaaaggttatatcctttaa

SEQ ID NO: 826 - protein, 430 aa, Leptospira interrogans
MGIGMIMKWTKRLLLLLTLLLPFVLFGQEASTPVADKGDTVWMIVASALVFFMIPGLALFYGGLVRSKNVLSTMMHSFVAILVLTLQWTIFGYSFAFSGTNPYFGNFDLAFLNGIDENTLELTIPKYIHFLFQGMFALITPALISGAIAERVKFGGYIIFILLWSTLVYDPVAHWVWAADGWLFKMSALDFAGGTVVHLISGIAGLAAAIVLGKRKGEGPALIAPNNLTYTLIGAGLLWFGWFGFNAGSGLAVNGITARAFLVTLIAPAAAGVAWLVIEYFHTKKATALGAASGIVAGLVVITPASGFVGVQGAIIMGLLVSPVCYAAILLKGKLGYDDSLDAFGIHGVGGALGAVLTGVFTLTLGAGVASKGDQILVQLISVAATGAYSFIVSMILVFLIDKTIGFRISEEKEITGLDSEIHGEKGYIL

SEQ ID NO: 827 - DNA, 1287 bp, Escherichia coli
  Escherichia coli O6
  CDS (1)..(1287)
atgaagatagcaacgataaaaactgggcttacttcactggcgatgctgccgggactggtaatggctgcacctgcggtggccgataaagccgacaatgcgtttatgatgatttgtactgcgctggtgctgtttatgaccgttccggggattgccctgttttatggagggctgattcgtggcaaaaacgtgctgtcgatgctgacgcaggtgaccgtgacgtttgcactggtctgtattctctgggtggtttacggctactcgctggcgtttggcgaaggcaacaacttcttcggcaacattaacgggttgatgctgaaaaacattgaactgacggcggtgatgggcagcatttatcagtatatccacgtggcgtttcagggatcgtttgcctgcattaccgtaggcttgatagttggggcgctggcggaacgaatccgcttctcagctgtgttgatttttgtggtggtatggctgacgctctcttacattccgattgcgcatatggtctggggcggcggtttgctggcttctcacggggcactggatttcgcgggtggcacggtggtgcatattaacgccgcaatcgccggtctggtgggcgcgtatctgataggcaaacgcgtgggcttcggtaaagaggcgtttaaaccgcacaacctgccgatggtcttcaccgggactgctattctctatatcggttggtttggctttaacgccgggtcagcgggcacggcgaatgaaatcgcggcactggcatttgtgaatactgtggtcgcaactgcggcggcaattcttggctggatcttcggtgaatgggcgctgcgtggtaagccttcactgctgggagcgtgttctggcgcgattgccggtctggtcggcgtgacgccagcctgtggttacattggggttggcggcgcgttgattatcggcgtggtagctggtctggcgggcttgtggggcgttaccatgctcaaacgcttgctgcgggtggatgatccctgcgatgtcttcggtgtgcacggcgtttgtggtattgtcggctgtatcatgaccgggatttttgccgccagctcgctgggcggtgtgggcttcgctgaaggtgtgacgatgggccatcagttgctggtacagctggaaagcatcgccattacgattgtctggtctggtgtggtggcatttatcggctacaaactggcggatctgacggttggtctgcgtgtaccggaagagcaggagcgagaagggctggacgtcaacagccacggcgagaatgcctataacgcgtaa

SEQ ID NO: 828 - protein, 428 aa, Escherichia coli
  Escherichia coli O6
MKIATIKTGLTSLAMLPGLVMAAPAVADKADNAFMMICTALVLFMTVPGIALFYGGLIRGKNVLSMLTQVTVTFALVCILWVVYGYSLAFGEGNNFFGNINGLMLKNIELTAVMGSIYQYIHVAFQGSFACITVGLIVGALAERIRFSAVLIFVVVWLTLSYIPIAHMVWGGGLLASHGALDFAGGTVVHINAAIAGLVGAYLIGKRVGFGKEAFKPHNLPMVFTGTAILYIGWFGFNAGSAGTANEIAALAFVNTVVATAAAILGWIFGEWALRGKPSLLGACSGAIAGLVGVTPACGYIGVGGALIIGVVAGLAGLWGVTMLKRLLRVDDPCDVFGVHGVCGIVGCIMTGIFAASSLGGVGFAEGVTMGHQLLVQLESIAITIVWSGVVAFIGYKLADLTVGLRVPEEQEREGLDVNSHGENAYNA

SEQ ID NO: 829 - DNA, 1326 bp, Corynebacterium efficiens
  CDS (1)..(1326)
atgcccagcatgaccgctgatcagatcgtggccacatcaggccacgccgcctggatgctcatatccgcatccctcgtcctgctcatgaccccggcgctcgccctgttctacggaggcatgtcccgacagaaatccgtcctcaacatgatgatgatgtcgttcggcaccctcggtgtcgtctccgtcatctacgtgctgtggggatggtcgatgtcctatggcacccagtcctggggtggcatcgtggccaacccactggagttcttcggcctgcgcaactctatcactgacgccgggggaaactacctcgagggggcctccggatatgcgaacatcatcgacatcgggttccagctcaccttcgcggtcatctccaccgcactgatctcgggtgcgctggcagagcgcgtgaagttctccacctggctcaccttcaccgccctgtggtccaccttcgtctacttccccctggcgcacatggtctggggtgggggactgctcgcccacggtgagacaggattcgccgcctggctcttcggtgtcaccgacggggaggccaccatcgcgcccatcgacttcgccggtggcaccgtggtgcacatctccgcgggtaccgccgcactggtgctggcactgatcatcggtgcccgccgtaccttccccatggtggcggcacgtccccacaatctcccgctggtcatgctcggtgccgcactgctgtggttcggatggttcggattcaacggcggttccgccttcgccgccgatggactggccggtctggcctggctgaacaccaccgccgccaccgcggccgcgatactcggctggctggccaccgaacggctgcgcgacggacatgccacctccctcggtgccgcctccggtgtggtggcaggactggtcaccgtcaccccggccgcaggggccctcaccccgctgaccgcgctcatcctcggcgtgatcggtggcatcctggcctgcctgggggtggggctgaaataccgcttcggtttcgatgactccctcgatgtggtcggcgtgcacctggtcgccggcctgtggggcaccgtcggtgtgggcctgctggccacagatgcgggctggttcaccggcgggggcatggatggttttagactctttatcatccagatcgtcatcgcggtggtggccatgatcttcgccgccgtgatcaccgcggtcatcgcctacctcctcaaggcgaccatgggttggaggatcgacgaggacaaggagcagcacgggatcgacaccgccgaacacggtgaatccgcctacgacaccgcagggcccgagattcgttag

SEQ ID NO: 830 - protein, 441 aa, Corynebacterium efficiens
MPSMTADQIVATSGHAAWMLISASLVLLMTPALALFYGGMSRQKSVLNMMMMSFGTLGVVSVIYVLWGWSMSYGTQSWGGIVANPLEFFGLRNSITDAGGNYLEGASGYANIIDIGFQLTFAVISTALISGALAERVKFSTWLTFTALWSTFVYFPLAHMVWGGGLLAHGETGFAAWLFGVTDGEATIAPIDFAGGTVVHISAGTAALVLALIIGARRTFPMVAARPHNLPLVMLGAALLWFGWFGFNGGSAFAADGLAGLAWLNTTAATAAAILGWLATERLRDGHATSLGAASGVVAGLVTVTPAAGALTPLTALILGVIGGILACLGVGLKYRFGFDDSLDVVGVHLVAGLWGTVGVGLLATDAGWFTGGGMDGFRLFIIQIVIAVVAMIFAAVITAVIAYLLKATMGWRIDEDKEQHGIDTAEHGESAYDTAGPEIR

SEQ ID NO: 831 - DNA, 1320 bp, Corynebacterium efficiens
  CDS (1)..(1320)
atggacccctcagatctcgcttggattctcgcagctttcgcattggtcagcctcatgttccccgggttggccctgctctacggtggaatgctcggcggacaccaggtgctcaacaccctcatgatggtcatgggtgccctcgcggtgacctgcctcgtgtacgtcacctacggccacggcctggtgatgggcaactcgatcggtggcctcggcatcatcggtaatcccctcgaccacctcggcttccacgacatcatggctgacgacggggccggtggactgatgtgggctggtttctacgtcctcttcgccgccatctcactggctctggtggcctcgggtgcggcgggccgcatgaagttcggggcctggatggtcttcggtgccatctggctcaccctcgtctacgccccgctcgcacactgggtcttcggcggcggttggatgatcaccgcactcggcttccatgacttcgccggcggcaccgccatccacatgaacgccggcgcctcgggcctggcactggctctggtgctcggacgtcgccacagcatggcggtgcgaccccacagcctgccgatgacactgctcggcgccgggatgatcatggtcggctggttcggtttcaacggcggcaccgccgggggagcgaacttcctggccagctatgtggtcgtcaccacgctcctggccaccggtggaggcatgctcggcttcatcctcatcgaacgcatccgggagggacgctccaccctgctgggcctggccaccggcatcatcgccgggctggtcgccatcaccccggcagccgacgcggtcagcccggtgggtgccctgatcaccgggttcctcggatccgccgtggccgcctgggtcatctcctggaaacgcacccaccgcatcgacgacaccctcgatgtcttcgccgtccacggcatggccggcgtggccggagcactgttcgtcatgctcctgggctcacccgatgctccggcgggactggccggcgtgctccgtggcggggagctgtccctgctctggcgtgaaccactggccatcatcatcaccctcggctacgccttcggcatgacctggctcatcgccaccgtgatgaaccggatcaccccgatccgtatcgcgtccgaggacgagtacaccggcatcgacacagccatccacgccgaatctgcctacagcctcaccccggtgggcatggccagccgcaccaacccggagacccgcatccccgaggagaccgcacccgctgaccgggcgggcgtcgcaaagcgcaacacagaccagaaagaagacgcacgatga

SEQ ID NO: 832 - protein, 439 aa, Corynebacterium efficiens
MDPSDLAWILAAFALVSLMFPGLALLYGGMLGGHQVLNTLMMVMGALAVTCLVYVTYGHGLVMGNSIGGLGIIGNPLDHLGFHDIMADDGAGGLMWAGFYVLFAAISLALVASGAAGRMKFGAWMVFGAIWLTLVYAPLAHWVFGGGWMITALGFHDFAGGTAIHMNAGASGLALALVLGRRHSMAVRPHSLPMTLLGAGMIMVGWFGFNGGTAGGANFLASYVVVTTLLATGGGMLGFILIERIREGRSTLLGLATGIIAGLVAITPAADAVSPVGALITGFLGSAVAAWVISWKRTHRIDDTLDVFAVHGMAGVAGALFVMLLGSPDAPAGLAGVLRGGELSLLWREPLAIIITLGYAFGMTWLIATVMNRITPIRIASEDEYTGIDTAIHAESAYSLTPVGMASRTNPETRIPEETAPADRAGVAKRNTDQKEDAR

SEQ ID NO: 833 - DNA, 1302 bp, Brucella suis
  CDS (1)..(1302)
atgctcataacaggaagaaacaagcaaacggccctcgtggccagcctgcccgcacttttcgccctggcggggacggcaatggcgcaggacaccgcaccggcaccaaccctcgatacgggcgatacggcctggatgctgacttcaaccgcgcttgtgttgatgatgaccatacccggtctggcgctgttttatggcggcatggtgcgcaagaagaacgtgctgtccacggtgatgcaaagctttgccatcacctgcctcatgtccatcctgtggatgatcgcaggctattcgctggcctttaccgatggcggctcgctccattcctatattggcggcttctcgaaggttttcttctccggagtgacgatggaatcgctcaccggaaccatccctgaatatctcttcatcaccttccagatgacgtttgcgatcatcacgcccgcgctgattaccggctcgtttgcagagcgcatgaagttttcctccatgctggttttcctgacgctgtggctgttcatcgtttatgttccggttgcccattgggtctggggcgggggcttcatggcttccgatggcgtgcttgattttgccggtggcacggtcgttcatatcaatgccggtgttgccggtctggtggcagccctcgttatcggcaagcgcgatggttatggccacaccaacatggcgccgcacaatctcgtgctctcggtcatcggtgctgcccttctgtgggtgggctggttcggcttcaatgccggttctgccgccggtgccaatgcgcttgccggtgtcgccatgctcaacacgcaggtcgcaaccgccggtgctgctcttgcgtggatgtttgtggaatgggctatttccggcaagccaagtgtgctcggcattatttccggcgctgttgcgggccttgtcgcggtcacgcccgctgccggttttgtcaatccgaccggcgcgcttatcatcggcatcgttgccggtgcggtctgctatgtggcggctgtgaagatcaagcatgtgctgggctatgacgattcgctcgatgcgttcggcgtccatggcgtcggtggttttgtcggcgcggtgctgaccggcttttttgccgatgctacgatcaatccggccagcgaaggggcaaccatcggcaagcagttcttcggcgccgccatcacgatcatttatacggcgattgccaccgtgatcatcctttacgtggtcaaggccatcatgggcttgcggcccggcaagcaggccgagatcgaggggctggatatcgccttgcatggggaggcggtgcagtga

SEQ ID NO: 834 - protein, 433 aa, Brucella suis
MLITGRNKQTALVASLPALFALAGTAMAQDTAPAPTLDTGDTAWMLTSTALVLMMTIPGLALFYGGMVRKKNVLSTVMQSFAITCLMSILWMIAGYSLAFTDGGSLHSYIGGFSKVFFSGVTMESLTGTIPEYLFITFQMTFAIITPALITGSFAERMKFSSMLVFLTLWLFIVYVPVAHWVWGGGFMASDGVLDFAGGTVVHINAGVAGLVAALVIGKRDGYGHTNMAPHNLVLSVIGAALLWVGWFGFNAGSAAGANALAGVAMLNTQVATAGAALAWMFVEWAISGKPSVLGIISGAVAGLVAVTPAAGFVNPTGALIIGIVAGAVCYVAAVKIKHVLGYDDSLDAFGVHGVGGFVGAVLTGFFADATINPASEGATIGKQFFGAAITIIYTAIATVIILYVVKAIMGLRPGKQAEIEGLDIALHGEAVQ

SEQ ID NO: 835 - DNA, 1296 bp, Bifidobacterium longum
  CDS (1)..(1296)
atgggagcgattgattccggtaacaccgcatggatcctgacatccgcgtccttggttttcctcatgacgcctggtgtggcgttcttctacggcggtatggttcgtgccaaggccgtcctgaacatgctgatgcttgaggcggccgccctgtcggtcaccatgattgtctggaccctgtggggttggtcgattgcttacgccggttccgacatcggaggcatcttcggcgacccggccagcggcttcctgctgaaggactccatggtcgcccaggacggcgtgttcaccgccaccggtctgaacggcaacaactacccggtttccgtggacgtcgccttccaggtcgctttcgcgatgattaccgtcggcctgatctgcggcgccattgccgagcgtgtgaagtacagcacctggatgattttcgtggcgctgtgggtcaccttcgactacgctcctatggcccacatggtctggaacggtggtctgctgtctgctgacggcgccatctccaaggccatcggcgcggccgcccacgatttcgcaggtggtactgtcgtccacatcaacgccgcagtcgccgccctgatcatcgtgctcatcatcggcaagcgtaagggcttcggcacgcagccgttccgcccgcacaacgtgccgttcgtgatgctcggcgccttcctgctgtggttcggctggttcggcttcaacgctggttccgccttcgccgccaacggtactgctggttacgcttgggtttccacctccgccgccaccgcagccgcaatgctctcttggggcttcaccgagaagattcgctccggtcactacaccgccatgggtgccgcctcgggtatggtcgccggcctggtcgccatcaccccggccgccgatgtggtttccccgctgtgggccatcgtgatgggtgccatcgctggtgtcctgacctgcctggcctgcggtctcaagttcaagttcggctacgatgactccctcgacgttgtcggcgtgcatggcgttggtggtttcaccggcaccatcctcatcggcttcttcggtgaaggcaccggtctgctggctggtggcgactggaagcagctcgtcgttcagctggtcatcgctctcgtcgccatcctctactccgcagtgatcaccgcgatcatcgccttcgctctggagaagaccatcggttggcgcgtcaccgaagctcaggaagtcggcggcatcgatcttgccgaccagggcgaacgtgcttacgattttgctggtactgccagctccgttctcaaggaggtgaagtga

SEQ ID NO: 836 - protein, 431 aa, Bifidobacterium longum
MGAIDSGNTAWILTSASLVFLMTPGVAFFYGGMVRAKAVLNMLMLEAAALSVTMIVWTLWGWSIAYAGSDIGGIFGDPASGFLLKDSMVAQDGVFTATGLNGNNYPVSVDVAFQVAFAMITVGLICGAIAERVKYSTWMIFVALWVTFDYAPMAHMVWNGGLLSADGAISKAIGAAAHDFAGGTVVHINAAVAALIIVLIIGKRKGFGTQPFRPHNVPFVMLGAFLLWFGWFGFNAGSAFAANGTAGYAWVSTSAATAAAMLSWGFTEKIRSGHYTAMGAASGMVAGLVAITPAADVVSPLWAIVMGAIAGVLTCLACGLKFKFGYDDSLDVVGVHGVGGFTGTILIGFFGEGTGLLAGGDWKQLVVQLVIALVAILYSAVITAIIAFALEKTIGWRVTEAQEVGGIDLADQGERAYDFAGTASSVLKEVK

SEQ ID NO: 837 - DNA, 1392 bp, Acetobacter diazotrophicus
  Acetobacter diazotrophicus (Gluconacetobacter diazotrophicus)
  CDS (1)..(1392)
atgagtctcccccgcactattcggactttctcacctcgcggcaccaccatcgccctggccacgctggccggggcggcgctgccggccatggccgcgcccgccatggccgccgatccggccccgcccgccatcaacaccggcgataccgcctggatgctggtcagcaccgcgctggtgctgatgatgaccgtaccgggcctggccctgttctatggcggcatggtccgcaagaagaacgtgctggccacgctgatgcagtccttcgccatctgctgcatcgtcacgattgtctggatggtcgcgggctacagcctggcgttcggcaccgggtcgccctacatcggcgatctgtcccgcttcatgctgaacggcatcggcgcgcagatttccaaggggtccgatgtcggcttcacgctggggctggggtcggccaacgccacggtgatgacgatccccgagagcgtcttcatgatgttccagatgacgttcgcgatcatcaccccggcgctgatcaccggcgccttcgccgagcgcatgaagttcagcgcgctgtgcgtgttcaccatcctgtggtcgctgctggtctatgcgccggtcgcccactgggtctggagcccgcttggctgggtcgcggggttcggcgccatcgatttcgccggcggcaccgtggtgcacatcaatgccggcgtcgccggcctggtcacggcgctggtggtgggcaagcggcagggctacggccaggacgatatgtcgcccttcaacctgacctatgccgtcatcggcgcgtcgctgctgtgggtcggctggttcggcttcaatgccgggtcggcggtaggggccaacggccgcgccggcatggcgatggcgacgacgcagatcgccagcgccgccgccggggtggcctggatgctggccgaatgggcccgcaccggcaagccgacggtgctgggcatcatttccggcgccgtcggcggactggtcgcgatcacgcccgccgccggcttcgtgctgccgggcggggccctgatcatcggcctgctggccggcgcggtctgccactggaccgccaccaccatgaagcacatgctgggctatgacgacagcctggacgccttcggcgtgcatggcatcggcggcatcctgggcgcgctgctgaccggcgtgctggcctatggcccgctttcggccaccgacgccaatcccgccggggtcgtgggatccttcgcgcagctcgtcacccaggccaaggccgtgggcgtcaccatcgtctggtgcgcggtcgtcaccttcgtcctgctgaagatcgtcgacctcgccatcggcctgcgcgtccggagcgaggacgaaatcgaggggctggacatgacccagcacggcgaacgcatcaactga

SEQ ID NO: 838 - protein, 463 aa, Acetobacter diazotrophicus
  Acetobacter diazotrophicus (Gluconacetobacter diazotrophicus)
MSLPRTIRTFSPRGTTIALATLAGAALPAMAAPAMAADPAPPAINTGDTAWMLVSTALVLMMTVPGLALFYGGMVRKKNVLATLMQSFAICCIVTIVWMVAGYSLAFGTGSPYIGDLSRFMLNGIGAQISKGSDVGFTLGLGSANATVMTIPESVFMMFQMTFAIITPALITGAFAERMKFSALCVFTILWSLLVYAPVAHWVWSPLGWVAGFGAIDFAGGTVVHINAGVAGLVTALVVGKRQGYGQDDMSPFNLTYAVIGASLLWVGWFGFNAGSAVGANGRAGMAMATTQIASAAAGVAWMLAEWARTGKPTVLGIISGAVGGLVAITPAAGFVLPGGALIIGLLAGAVCHWTATTMKHMLGYDDSLDAFGVHGIGGILGALLTGVLAYGPLSATDANPAGVVGSFAQLVTQAKAVGVTIVWCAVVTFVLLKIVDLAIGLRVRSEDEIEGLDMTQHGERIN

SEQ ID NO: 839 - DNA, 1818 bp, Medicago truncatula
  Medicago truncatula (Barrel medic)
  CDS (47)..(1531)
aaatttcatcaaaacttgaagaacaagacttgaacaaagaactaccatggcagcatcaccagcataccaagcacatcttccaacatcaccagaatggttaaacaaaggagacaacgcatggcaaatgacagcagcaacactagttggtttacaaagcatgccaggactagtaattctctatgcaagcatagtgaaaaagaaatgggcagtgaattcagctttcatggcactatatgcttttgcagcagtattaatctgttgggttcttgttgcttatagaatggcttttggtgatgaacttttacctttctggggtaaaggtgcaccggctttaggacaaaaatttcttgttgctagagcaaaagtacctgcaagtactcactattacaagaatggtgttgatattgaaacacctatggaagaacctttttttcctatggcttcacttgtttattttcagtttacttttgctgctattactatgattttgttggctggttctgttcttggaagaatgaatattaaagcttggatggcttttgttcctctttggcttattttttcttatactgttggtgcttttagtctttggggtggtggatttctttatcattggggtgtgattgattattctggtggttatgttattcatctttcttctggaattgctggtttcactgctgcttattgggttggaccaaggataaagagtgatagggaaaggtttccaccaaacaatgtgttgctgatgcttgcaggtgctggattgttatggatgggttggtcagggtttaatggtggagcaccatatgcagcaaatgttgcatcttcaattgctgtattgaacacaaacatttgtgcagcaactagtcttcttgtgtggacctctcttgatgttgttttctttggcaaaccttctgtgattggagctgttcagggtatgatgactggacttgtatgtatcacaccaggagcagggcttgtgcaatcgtgggcggctattgtgatgggaattctatctggtagcattccttgggtctccatgatgatcttgcataaaaagtcgagtcttctacaaaaggttgatgacactcttggagtatttcacacacatgctgtggcaggcctattgggtggcctactaacaggactctttgcagagccagccctatgtagattactattgccagtgacaaattcaagaggtgcattctatggtggaagtggtggtatgcaattgctaaagcaattagtggcagcaatgtttgttattggatggaacatagtctccaccacaatcattctccttgttatacaactattcatacccttgaggatgcccgacgagcagctcgaaatcggtgacgatgcggctcacggagaggaggcttatgccctttggggtgatggagaaaaatatgatccaactaggcatggttcgttgaatactggtaacactggagtgtcaccttatgttaatggtgcaagaaggtgtgactataaatttatgagtcacaacttgcaagtataggtgttttgtgtatggaaggtgtgaggagaattttgatttttcccatggaagaaaagttctcaagttttgagatcaaattggttgtgtgtatttagttcttctagtcaccttgatttttgacattttgtagttgaaaattattgtaaagaaaatattgatgtagctatgaagttagatttgtcaattttttattgacctgaaagcttcagaaaatttcttgtagaattggaactaaaacgtctagtgattaattgttacttgtaaaaaaaaaaaaaaaaaaaaaaaaa

SEQ ID NO: 840 - protein, 494 aa, Medicago truncatula
  Medicago truncatula (Barrel medic)
MAASPAYQAHLPTSPEWLNKGDNAWQMTAATLVGLQSMPGLVILYASIVKKKWAVNSAFMALYAFAAVLICWVLVAYRMAFGDELLPFWGKGAPALGQKFLVARAKVPASTHYYKNGVDIETPMEEPFFPMASLVYFQFTFAAITMILLAGSVLGRMNIKAWMAFVPLWLIFSYTVGAFSLWGGGFLYHWGVIDYSGGYVIHLSSGIAGFTAAYWVGPRIKSDRERFPPNNVLLMLAGAGLLWMGWSGFNGGAPYAANVASSIAVLNTNICAATSLLVWTSLDVVFFGKPSVIGAVQGMMTGLVCITPGAGLVQSWAAIVMGILSGSIPWVSMMILHKKSSLLQKVDDTLGVFHTHAVAGLLGGLLTGLFAEPALCRLLLPVTNSRGAFYGGSGGMQLLKQLVAAMFVIGWNIVSTTIILLVIQLFIPLRMPDEQLEIGDDAAHGEEAYALWGDGEKYDPTRHGSLNTGNTGVSPYVNGARRCDYKFMSHNLQV

SEQ ID NO: 841 - DNA, 1654 bp, Phytophthora infestans
  Phytophthora infestans (Potato late blight fungus)
  CDS (16)..(1572)
cacggcctcatctaaatgatgctcggagataattcgccactcactcggctcgccgttgcggcaactgcagctgtcgcattcagtgcatttgtagtgtccgcccaagaatcgaccgtcacctgcgaagtttcccagtaccttgactccgccaccaatgagtgtgtcgactactcttcgcgaggtgcaaaggctggtaacgcgtatgacacgacaattgactccggcaacacggcgtggatgctaatgtcaagtgcattggtgatgctcatgaccccgggtgttgccttcttctacgccggtttggctggcgaagacatggcgtcgaataccatgatgatgtcgttcgtgagcatggcgatggtgtcgatccagttcttcgccttcggttactcagcgtgcttcagttccgacggtatattcgcctgggcggggtacaacaatgttggcgccgtcgctagtggaacgtatggtggcagtatccctcacattctcttcgccttctttcagacgcagtttgccacaatcacaccagcgctgatcagcggcggaattgtcggccgcatgaagtttggtagctacctgcttttcatcctgctgtggacgtccatcgtatacgaccctctggctcgttggatgtggtcgctcaagctcgatgaaatctgggagatcactgcaatgggctgggaaggcaagatgggtgcgctcgatttcgctggtggtacagtcattcacgtctccagtgggtttggtgcccttgtggccgccattgtggtggggaagcgatacaaccacggcgagcctgtgaagccgcacaacgtacccttggtgatgatcggtgccacgctgctatggttcggctggtttggattcaacgccggatctcagggggcggctgacggcgttgctgcgattgctgctatcaacacgcatctagcgccatgtgctggatttttgacctggtcagctcttgagttcgctttccacaagaactttgatccttgcggtgccatcagtggagcagttgctggacttgtggccatcaccccaggctgtgcctttgtgtacccgtgggctgctgtcatctttggcgtcgtcggttctgcgactggtttcggtgctgtccacctcaagaacgttctgcgttatgatgatactctcgactccttcggtatccacggctgcggcggtttcatgggcggtctgcttacgggtctattcgccacctccgagataaacccgtctattgaaggcggtgcattttacggccacggaatgcagttcgtacaccaactcgtttcacagtgtgtggcagctgcgtactcggcagtggtgacgttcctcatcctaatggcgcttaagtacacggtgggtcttcgcgtctcggaggagaaagaagtaaacggcatggatatttcgtaccacggtggccaggcttacgactacagtgcacatggcgggcttagctctcctactgttaaggcggctaaccctcccgttggcgacttcatgagcatgatgacttctggccagcccagtggaaatggagctaaccatattgcgaatgaactttaaactggttttatcggcagtgagacgcgctggattgcccctccaacctggaatgatacctgaatatatttcaaccccatattaa

SEQ ID NO: 842 - protein, 518 aa, Phytophthora infestans
  Phytophthora infestans (Potato late blight fungus)
MMLGDNSPLTRLAVAATAAVAFSAFVVSAQESTVTCEVSQYLDSATNECVDYSSRGAKAGNAYDTTIDSGNTAWMLMSSALVMLMTPGVAFFYAGLAGEDMASNTMMMSFVSMAMVSIQFFAFGYSACFSSDGIFAWAGYNNVGAVASGTYGGSIPHILFAFFQTQFATITPALISGGIVGRMKFGSYLLFILLWTSIVYDPLARWMWSLKLDEIWEITAMGWEGKMGALDFAGGTVIHVSSGFGALVAAIVVGKRYNHGEPVKPHNVPLVMIGATLLWFGWFGFNAGSQGAADGVAAIAAINTHLAPCAGFLTWSALEFAFHKNFDPCGAISGAVAGLVAITPGCAFVYPWAAVIFGVVGSATGFGAVHLKNVLRYDDTLDSFGIHGCGGFMGGLLTGLFATSEINPSIEGGAFYGHGMQFVHQLVSQCVAAAYSAVVTFLILMALKYTVGLRVSEEKEVNGMDISYHGGQAYDYSAHGGLSSPTVKAANPPVGDFMSMMTSGQPSGNGANHIANEL

SEQ ID NO: 843 - DNA, 1332 bp, Chlorobium tepidum
  CDS (1)..(1332)
atggcgaaaaaaatcagtgcggcggtgatgctgttttttgcagtgatgatggcgcatggcaccgtttgggcaggcgagccggtgagcatcgataccggcacgacatcctggatgctgacctccacggcgctcgtgttgctcatggtgccagggttggcgatgttctatggcggcctggtcaggacgaagaatgttatcggcacgatgatgcacagctttggcgctatggtcatcattggcgtcttgtggccactggtcggatactcgctcagctttggccacggtattctcggcggcctggttggatgggatccgaaatatttcatgttgcaggggattgatgataccatcatggcgagtcatatccctgaatatgtctttgccatgttccagggcaaattcgccatcatcactcctgcgctgattgctggtgcttttgccgagcgggtcaatttcaaggggtatctgttgtttattgccttgtggagcattttcgtgtacagcccgatctgccactgggtctgggctggcgacggttttctgttcaatctcggcgcgatgggcgctatcgattttgctggtggcacggtcgtgcacatctcttccggcgtgaccggccttgtcgcggcgctcttccttggctcgcgtcgcggatatccgagcaacgtcacctcgccgaacaacctggtcatgaccctcgtgggtgcgggcctgctctgggtgggatggttcggtttcaatgctggcagcgccatcgccagcgatcttgccacggctcgcgcactgaccgtgacccaggttgccgcggcgtcgggcgcattcacctggctcatcatcgaactggtgcatcacaataaggcaaccagccttggcgtggcatcgggtattctggctggtctggtggcgatcacccctgccgcgggcgtcgtgcagccatcgggcgcgttcgcgcttggcgctattgccgccattgtctgctacctcggcctcatgctgaagagcaagctcggctacgatgacagcctcgatgctttcggcgtgcacggtgttggcggtattgtcggcgctctctgcctgattttcttcattcgcccgtcgtggatggccgacgccgctgtcaaggctggcggaagctggacggtctggcagcagcttggcgttcaggctacggctgtcgggattacggtcgtctatgcggcagttgtttcactggtgatcctgttcatcgtcgagaaaaccatcggcctgcgtgccaaagagaatgatgaaatgtccggtctcgatcacagtatgcacagtgaacagggatatggccttatcaatcctaactaa

SEQ ID NO: 844 - protein, 443 aa, Chlorobium tepidum
MAKKISAAVMLFFAVMMAHGTVWAGEPVSIDTGTTSWMLTSTALVLLMVPGLAMFYGGLVRTKNVIGTMMHSFGAMVIIGVLWPLVGYSLSFGHGILGGLVGWDPKYFMLQGIDDTIMASHIPEYVFAMFQGKFAIITPALIAGAFAERVNFKGYLLFIALWSIFVYSPICHWVWAGDGFLFNLGAMGAIDFAGGTVVHISSGVTGLVAALFLGSRRGYPSNVTSPNNLVMTLVGAGLLWVGWFGFNAGSAIASDLATARALTVTQVAAASGAFTWLIIELVHHNKATSLGVASGILAGLVAITPAAGVVQPSGAFALGAIAAIVCYLGLMLKSKLGYDDSLDAFGVHGVGGIVGALCLIFFIRPSWMADAAVKAGGSWTVWQQLGVQATAVGITVVYAAVVSLVILFIVEKTIGLRAKENDEMSGLDHSMHSEQGYGLINPN

SEQ ID NO: 845 - DNA, 2716 bp, Chlamydomonas reinhardtii
  CDS (26)..(1654)
gaggttcgctggctagagcacaacaatgagcgaagcttgtctcctcgctgcaaagtcggctttggtcggcgtcgccaatggcgatagcctcgcgtccgcaatttgcgcggcgatggaggctgccgcaccagtggctcgccacctgcaagagacaacggtggatctaactacgctccaagagacggtcgacactattgggctgaacttgcaaggcacaatggacggcctgaacacgctgctgctgctctacggaggcgcgctggtgttcctgatgcacggaggctccgctatgctcgaggccggtgccatccgctccaagaacgcgatgaacatcctgctgcagaccgtcctcgacgcctcttgcagcgcgctcatgtggtacttcgtcgggttcgccttcgccttcggcattggcgacaagcccaacaagtttatcggcaacgccatgtttgcgctggtggacattgatacgcacaacaccggctcgggcaccggcaagtggatcgactggttcttccagtgggccttcgccgcaaccgccgtcaccattcccgccggcgctgtggctgagcgtttcaacttcaacgcctacctgggctattccatgttcatcggtggctgggtctaccccatcattgcccactgggtgtggtgcattgagggctggctgggctatggcgtgatcaagcccttcatcaacgccggcatgattgacttcgccggatccggcgtcatccacatgactggcggcctggccggcctcatcggcgccatcatggtgggcccccgcctgggccgcttcgacgccgacggcaagcccgtcgacatgcccggccactccgccatcctggtggtgctgggaaccgtactgctgtggttcggctggtacggattcaaccccgcctccgtgctgctcatcaactccagcacctacgccatcgtgtgcggccgcgcggccgtgtgcaccacgctggccggcgccgcgggcggcgtgagctgcctcatcttcggctttgcgcgccaccgcggctgggacctggtcggcctctgcaacggcatcctgtgcggcttcgtcgcagtcaccgcctgcccccacgtgatctacccctgggccgcaatcatctgcggcctggtcgcgggcctgtggtttgagttcctgtgctggctgttgctcaagctcaagatcgacgacccgttgtcagctgggccgatgcacttcggctgcggcatgtggggcgtcttcttcaccggcctcttcgcgcgccagcaatacatccaggagtactacgtgcacggcccttccgcggccggcgagctgtccaagccctacccctggggcgccttctacaagggctacaatgccgacggcgagctggtcatgtccgatggcaagctgctcgcgtcgcagatcgtgggcatcctggttatcatcggctgggtgattggcatgatggttccgttcttcggcattttccagttctttggcgcgcttcgcattccgcccgaggaggaggagatgggcctggaccgctccaagcacggcggctcggcctacaatggcaccggtgccaacacgctcggcggcctgtcgcccggcaacgacgtgatgcgaaacaactcgcctttgggcaaggttctgcctgtgaccgcgtaaggaccggcggcgttatgcggcacgacggcgtcaggggatcaggagggaacgcagaaccggagctgtggctgcggccatggcagcggcggcggctggtgaccgacgttcttgtgaggatggtaaagggcgagcattcaaatgcgtgaagcgtgaagaactgcagtgtgtggattggggagggggggccagattccactagcacgttgtgtgctgctggcagcagcacgatgattgacgattggaaaacgcttgctcgtgagcggctcgtgtgacgtgactaggggcgcattttttgacagagcgatccgaatgtatgcctatgatcagtaagggcatacgttgctgctgcttgggcgcgggggcctgctgcgccagttgcattgctgcctgcgtgtcaggcccgttgggcgcccattcgagtttggcgttccgcattcatatcacacctacttaagcgccacacattcacgcatcccagccccttacccggatctgaaccatactatgatgcatcatgtttgacaagtgtctgtgtgtgactgtcgtgacttaaaccatgagcgcgctgccgggtgctgattgcgagaaggctggacggcttcgcaggtgactggaccgcaggacagcgtgcttttactttctggtacggtacgaattgcttgacacctccttgcacaatgaattgtcgtgtgtgcgcgcgtaacttcgtagatttgaaagtagtcttgttgtgcgctcgcgtgtgatttgcgcccccctgagtgatttcctgcgaacagttcggaccttgaagttacttgtatgggcatatgggtaaacagcggtcttcagaggaccaacttcagtcaggggacggaaggcatggtgtgcatcaggtgcgtgtgtgcgtgcgtgcatgtggtggacggagattgggccgaggggaaagaaagcccccgcgccatgactgtgacggcggcactgcaaagtgggcgcacgtccagagccaaacaacggctgtaacgatattccgaatgcaaaaaaaaaaaaaaaaaaaaaaaaaaaaaaaaaaaaaaaaaaaaa

SEQ ID NO: 846 - protein, 542 aa, Chlamydomonas reinhardtii
MSEACLLAAKSALVGVANGDSLASAICAAMEAAAPVARHLQETTVDLTTLQETVDTIGLNLQGTMDGLNTLLLLYGGALVFLMHGGSAMLEAGAIRSKNAMNILLQTVLDASCSALMWYFVGFAFAFGIGDKPNKFIGNAMFALVDIDTHNTGSGTGKWIDWFFQWAFAATAVTIPAGAVAERFNFNAYLGYSMFIGGWVYPIIAHWVWCIEGWLGYGVIKPFINAGMIDFAGSGVIHMTGGLAGLIGAIMVGPRLGRFDADGKPVDMPGHSAILVVLGTVLLWFGWYGFNPASVLLINSSTYAIVCGRAAVCTTLAGAAGGVSCLIFGFARHRGWDLVGLCNGILCGFVAVTACPHVIYPWAAIICGLVAGLWFEFLCWLLLKLKIDDPLSAGPMHFGCGMWGVFFTGLFARQQYIQEYYVHGPSAAGELSKPYPWGAFYKGYNADGELVMSDGKLLASQIVGILVIIGWVIGMMVPFFGIFQFFGALRIPPEEEEMGLDRSKHGGSAYNGTGANTLGGLSPGNDVMRNNSPLGKVLPVTA

SEQ ID NO: 847 - DNA, 2568 bp, Chlamydomonas reinhardtii
  CDS (106)..(1845)
cacacgcccagttactgctagatattagcgagggcgacaatggagccacggccagtgtctttgaccagcatttaacccttgcaatttgttggcgaacaaagcaaaatggcttcacctgcgccgagcggctctccgccgctcgttatctatagctgcactgatgagcaaatgctagaagtgaccgagctagtgggcgactccgcgacagcggccatagtttgtagccaatatgactgcagtttcacggcagtcagctgtgtgcttaagtatcttgccgcgcaacaagcggacttgagcgagcaaatggacggcacagccaaagcggaggtcgccttgtcgctagacgtggcgttcctcctattcagcgcataccttgtgtttggaccgatgcaattaggctttgcgctgctctgcgcgggcgccatccgctcgaaaaatagcatgaatgtgttgatgaagaacatcttggacgcgtgcactggcgccatcgggttctacctgttcggctatgcgttcgcgttcggacaccacgccaaccagacctccaacgccttcatcggcgaccacaacttcgcgctgtcgtacaccacacaggtcagcagcctcgacagcaacgtcagctacgacgggttcgccacgcagggctggcacgtgttcttcttccaatggagcttctgcgcggccgccaccaccatcgtgtccggcgccgtggcggagcgctgcaccttccaggcctacctggcctacgccttcttcatctcctccttcgtctaccccgtggtggtgcactgggtgtggagcgccagcggctggctgtccgcattcaacacgtcccgggacggctacgcgctgctcctgcagacgggcgccatcgacttcgcgggcggcggcgtggtgcacctcaccggcggcatggcggcgctcatgggcgcttggatcatcggcccccgcatcgggcgctttgacgcgtccggcaaggtgaacgagatgaaggggcacagcgccacactggtggtgatgggcaccttcctgctgtggtttggattctacggcttcaaccctggatccaacctcaccatcgcgaccacggcctcggccatcgtggtgtcccgtgttgcggtgaccaccacgctgtctgcgggcgcggccgggctcacggggctgttctggcgctacatgcgcacatccacctgggacacagtgctggtgtgcaactgctgcctggccggcctggtgggcataacatgcagctgtagtgtggtggagccctgggcggcgctcatctgcggcttcgtggcggcgttcgtgttcatcgggttcgaatacgtggtgttgtacaagatgaagatcgacgaccccgtgagtgcggtggcgctgcacctgttctgcggcgtgtgggggctgctcttccccggcctcctggcgcaacccacctatgtggcggacgtgtacggcgcgtacggcttcgggccggatgtgaagggcagcaagaagttcggcatcctgtacggcggtcacggccaggtgctgctgtgtcaggtgattgaggcgctgtccatctgcgcctgggtgggcgtcatgatgggcgccttcttcgggctgctcaaggtggccaagaggctgcgcgtgcccgtggaccaggagctggcgggactggacgtgagcaagcacaccaaggaggcctacaacggcgccatcatgcccacagcgggaggaggggcaggaggcgggggcggctacggctccaatggcggggagcggggcagcggcttctacacgggggcggggccggcaggcgacaccagcacgggcggggggcacgccgccaacggcggctacgactgagctggactgcgccgctgggaagagaaggcgagctggtggcagggctgggattggggaggagccgtgcgcttgctcattgtgcgtagcgtccgggcgcgtttgttgggatgtggggaaggtgcgggatcacaggatgggggttagctgcgacgctgcgagacagaggttgggcagggccctgcgaaggagtgtgctggcacgtatggaaagctaagaggcaaatgtttgggcttgtgatgagccaggggcgtcattaagacgatgcatgcgcgtgtgttgtgtgtcggcgacagcggcgcaggtggtgtgcggccgtgtgacacgcgggcagcggcagctcgacggggtcactgaagtaaccgcgtgcctggcggtccgtgtgtgcccggcataccgtatgaactgtgtgtgcccagctcaatgactatgtgctttgtgtgtggaactgtggacgattgcgcgcgtgtgcgcgagcgttgtggcggtgcaggccgtaattcatccgtgtgtgtaacaagtggtaagttcgtgaggaggaggcgcgtggcaggacaaggcaggaacttggacgagcgctgggatgcatgccatgccatagagtggagcggaacaactgtgtggctgcaacagggggcaagtggccaggccttgcctatcagggcagggagctgagtagcagagcactagagcagcagaaggcggacatcctgtaactgtacgccc

SEQ ID NO: 848 - protein, 579 aa, Chlamydomonas reinhardtii
MASPAPSGSPPLVIYSCTDEQMLEVTELVGDSATAAIVCSQYDCSFTAVSCVLKYLAAQQADLSEQMDGTAKAEVALSLDVAFLLFSAYLVFGPMQLGFALLCAGAIRSKNSMNVLMKNILDACTGAIGFYLFGYAFAFGHHANQTSNAFIGDHNFALSYTTQVSSLDSNVSYDGFATQGWHVFFFQWSFCAAATTIVSGAVAERCTFQAYLAYAFFISSFVYPVVVHWVWSASGWLSAFNTSRDGYALLLQTGAIDFAGGGVVHLTGGMAALMGAWIIGPRIGRFDASGKVNEMKGHSATLVVMGTFLLWFGFYGFNPGSNLTIATTASAIVVSRVAVTTTLSAGAAGLTGLFWRYMRTSTWDTVLVCNCCLAGLVGITCSCSVVEPWAALICGFVAAFVFIGFEYVVLYKMKIDDPVSAVALHLFCGVWGLLFPGLLAQPTYVADVYGAYGFGPDVKGSKKFGILYGGHGQVLLCQVIEALSICAWVGVMMGAFFGLLKVAKRLRVPVDQELAGLDVSKHTKEAYNGAIMPTAGGGAGGGGGYGSNGGERGSGFYTGAGPAGDTSTGGGHAANGGYD

SEQ ID NO: 849 - DNA, 1296 bp, Dictyostelium discoideum
  Dictyostelium discoideum (Slime mold)
  CDS (1)..(1296)
atggaacaattttcaacttcatcatcagaaagttcagattcatcatcagagtattcattagagttttatatggatacttcatgggttttagatgctgcaaatttagtattttttatgcaagcaggatttggcatgttagaagcaggtatggttagagcaaagaatacaaagagtatattattaaagaatttaattaatacagcaatatgtgcaatttcatattattgtgttggacattcatttgcgtatggaaaggttaatccaaattcatttgtaggatttgggaatttctttttaatggattatacacattatgcctattggatgatacaatgggcctatgcagcaactgcaacaacaatagcaacgggcgcaatggccgagagattacaactacattgttatatattgtttacattggttcaaactatactgatttatccattcgttgcacattggatttggagtcagaatgggtggttgttcgatttgggtattgtggattttgcaggtggtgccgtcattcatattgtggcgggtataactggtgcatgtggaagttttctattgggtccgagaattggtaggttcaatcaagagagtggtaaaccaaagaatttacccggtcattcggtggtgttgatgagtttgggcgcaatgatactttggtactcttggtatggttatacagctggtgcttcattaggtatgacaagaagtagagttttaccagcttctcgtgttagtgttgttgtaacactatcaggtgcaactggtttaataacggttttaggtattggtaaaatattcaatggtcattatgacttggttaaaggtataaatggtttaattgctggtttagtatcttcaacttcatcttgtgcttatattgaaccatgggctgcaattataattggttttattggtggtattgtttattggttttcatcatgggcattattaaattggttaagattagatgatccagttgattcaacagcaattcatttatttggaggatgttggagtctaataagtgttgcatttttcgctacacatggtagagttaggaacccagatatcattttacctggtggaatattttatggtggtggaattagtttattatgggtacaattagttggaatggttctggcaattttatgggcaggtttcctatcaggtattttcttttttacaatggattattttggtaaacttagagttgatgttgatactgagttagcaggtttagataattcaaatcatggtggtagtgcttatatatttgattaa

SEQ ID NO: 850 - protein, 431 aa, Dictyostelium discoideum
  Dictyostelium discoideum (Slime mold)
MEQFSTSSSESSDSSSEYSLEFYMDTSWVLDAANLVFFMQAGFGMLEAGMVRAKNTKSILLKNLINTAICAISYYCVGHSFAYGKVNPNSFVGFGNFFLMDYTHYAYWMIQWAYAATATTIATGAMAERLQLHCYILFTLVQTILIYPFVAHWIWSQNGWLFDLGIVDFAGGAVIHIVAGITGACGSFLLGPRIGRFNQESGKPKNLPGHSVVLMSLGAMILWYSWYGYTAGASLGMTRSRVLPASRVSVVVTLSGATGLITVLGIGKIFNGHYDLVKGINGLIAGLVSSTSSCAYIEPWAAIIIGFIGGIVYWFSSWALLNWLRLDDPVDSTAIHLFGGCWSLISVAFFATHGRVRNPDIILPGGIFYGGGISLLWVQLVGMVLAILWAGFLSGIFFFTMDYFGKLRVDVDTELAGLDNSNHGGSAYIFD

SEQ ID NO: 851 - DNA, 1434 bp, Hebeloma cylindrosporum
  CDS (1)..(1434)
atggtcaacgtcacatacgatgattctggcagcttggttgcctacacgcccgatggcactccaatcgtctacaacctcggcgacatggcctggattgctgcctccatggctctcgtctggattatgattccaggcgttggccttttttattctggtttgctacggcggaagaacgcgctgtcgatgatttggacgtctctcgcatccatcgctgttgtttcatttcaatggtttttctgggggtactcccttgcgttcagcgaaacgggaaacgccttcattggcgatcttaaatactttggtctaaagggtgtccttgatcagccttctattggcagcagccgtattcccgccatccttttctgtatctatcagctcatgttcgcggcgatcaccgctgccctcgccgtgggcgctattgctgagcgtggtcgtctcggccctctacttgtctttattttcgtctggtccacaatagtttacgaccctattgccaattggacctggaacaccaacggatggtcattcatcctcggcggtctcgattttgctggaggaacacccgtccatatcagctctggaaccgccgccctcgccatttccatcttcctgggaaagcgccgtggatatggaactgaacgcctcgcttacaagccccataacaccacctacgttatcctcggtaccgttttcctgtggttcggttggtttggtttcaatggtggttcagccctctccgccaacctccgcgcaatccaggcatgcattgtaaccaacctcgctgcttccgttggcggcctgacgtggatgctttgggattatcggattgaaaggaagtggtccgctgttggtttttgctccggagccgtctctggtctcgttgcaatcacccccgcctctggtttcgttggcgctcccgccgcggtcgcctttggcgttcttggtggaacggcctgcaattttgccacccagctaaaattcgttcttggttacgacgatgccctcgacatttttgctactcacgctattgggggaattgttggtaacctcctcaccggccttttcgcccaggccagtgtagctggattcgatggtatcaccgaaatccctggtggctggttggacaggcattacatccagcttgcccatcaactcgctgattccgtcgccggatttgcttactcctttgtcatgacaactatcatactttgggtcatgcatattattcccggtctgacgctccgcaccaccgaggaggcggagatcctcggtgtggatgacgctgagatgggagagttcgcatacgattatgtcggcattgaccaagaaatcggccatactctcgacactggccttaccgcgactggtggaggccgcgagcctgaccatgccaaggcagtgtcgaccagcagcgtagaagagaaatcagcatga

SEQ ID NO: 852 - protein, 477 aa, Hebeloma cylindrosporum
MVNVTYDDSGSLVAYTPDGTPIVYNLGDMAWIAASMALVWIMIPGVGLFYSGLLRRKNALSMIWTSLASIAVVSFQWFFWGYSLAFSETGNAFIGDLKYFGLKGVLDQPSIGSSRIPAILFCIYQLMFAAITAALAVGAIAERGRLGPLLVFIFVWSTIVYDPIANWTWNTNGWSFILGGLDFAGGTPVHISSGTAALAISIFLGKRRGYGTERLAYKPHNTTYVILGTVFLWFGWFGFNGGSALSANLRAIQACIVTNLAASVGGLTWMLWDYRIERKWSAVGFCSGAVSGLVAITPASGFVGAPAAVAFGVLGGTACNFATQLKFVLGYDDALDIFATHAIGGIVGNLLTGLFAQASVAGFDGITEIPGGWLDRHYIQLAHQLADSVAGFAYSFVMTTIILWVMHIIPGLTLRTTEEAEILGVDDAEMGEFAYDYVGIDQEIGHTLDTGLTATGGGREPDHAKAVSTSSVEEKSA

SEQ ID NO: 853 - DNA, 1251 bp, Staphylococcus aureus
  Staphylococcus aureus (strain MW2)
  CDS (1)..(1251)
atgaatcttaacgatacgatatttatgtttttgtgtacattattagtttggctaatgacaccaggattaagtttattttatggtgggttagttcaatctaaaaatgcgcttaatactgtcatgcaaagtatggcagcaattgtgcttgttacatttgtatggataacagttggttttacaattagttttgggaatgggaatttatggttcggaaattgggaatatacttttcttaatcatgtaggttttgcgactcaagaagatattagcccacatattcctttcgctttgtttatgttatttcaaatgatgttttgtacgattgcaatttctattttatctggttcaatcgctgagaaaatgaagtttattccttatttattattcgtagtaatatggactgctcttgtatacagtccagtagcacattgggtttggggcggcggttggattaacaaactcggtgtattagatttcgctggaggtacggttgttcatattacatcaggtgtttctggtttagtattagctattatgattggaaaaggaaacaaacattctgaatcaacaccacataatcttatcattacgttgattggcggtatattcgtgtggattggttggtatggatttaatgtaggtagtgcttttacatttgataaaattgcgatgcttgcatttacaaatactgtcatttcagccagtgcaggttctataggttggttaattttagaatatatttttaaaaagacgacaagtttacttggacttttactcggtgcattagcaggattagttgtcattactcctgcagcaggatatgtaacatatcttagtgcaacaataatggctttaataggaggtatctgttgttatattgtcattaattacatcaaggtaaaactaaaatatcatgatgcattagatgcatttggtatccacggtgttggtggtattattggtgctgctttaacagcagttttccaaagtaaaaaagcaaatcctgacattgaaaatggttttatttatactggtgacatacatattatacttgtacaaatattatgtgtaacagcagttgtaatttttagtatcgtcatgacgtttattattgcgaaagtaattaaattaattacaccattatctgttacggaacaagaaacgaatataggattagacaagattgttcacggtgaacatgcttactttgaaggtgagctaaatagattcaataaacatattcgatattag

SEQ ID NO: 854 - protein, 416 aa, Staphylococcus aureus
  Staphylococcus aureus (strain MW2)
MNLNDTIFMFLCTLLVWLMTPGLSLFYGGLVQSKNALNTVMQSMAAIVLVTFVWITVGFTISFGNGNLWFGNWEYTFLNHVGFATQEDISPHIPFALFMLFQMMFCTIAISILSGSIAEKMKFIPYLLFVVIWTALVYSPVAHWVWGGGWINKLGVLDFAGGTVVHITSGVSGLVLAIMIGKGNKHSESTPHNLIITLIGGIFVWIGWYGFNVGSAFTFDKIAMLAFTNTVISASAGSIGWLILEYIFKKTTSLLGLLLGALAGLVVITPAAGYVTYLSATIMALIGGICCYIVINYIKVKLKYHDALDAFGIHGVGGIIGAALTAVFQSKKANPDIENGFIYTGDIHIILVQILCVTAVVIFSIVMTFIIAKVIKLITPLSVTEQETNIGLDKIVHGEHAYFEGELNRFNKHIRY

SEQ ID NO: 855 - DNA, 1476 bp, Xanthomonas campestris
  Xanthomonas campestris (pv. campestris)
  CDS (1)..(1476)
atgcgctctgaccccacccaccccggagtccctatgaagacaggtcttgttgccgggtggaaagcccggttctacagcgtctgcatgctgatgctgttcagtgcgctggtggttggcggcttgggcaacgcgcaggctcagtccggcgcgcaggtcaccccattgccgaccgagccggtcaccaccgaaccgctccccaccgcacagccggccgccgcgccggttgcggcggccgaggcggcgccagtggtggagaagggtgacgtcgcctggatgctgacctccacgttgctggtgctgctgatggtggtgccgggcctggcgctgttctacggcggcatggtgcgcgccaagaacgtgttgtcggtgctgatccaggtggcggtggtgttctcgctgctggtggtgctgtgggtgttctacggctacagcctggcgttctccggcgaaggcccgtggatcggcaatctggacaaggccttgctcaagggcgtgaccatcgaaacgttgtcggccaccttcaccaagggcgtcagcctgccggaatacgtgttcgtggcgttccaggccaccttcgccggcatcaccggtgcgctgatcgtcggtgcgtttgccgaacgcgccaagttcgctgcggtgctgctgttctcggtgatctggttcaccttcggctatctgccgctggcgcacatggtctgggccaccggcggctatctgttcggcttgggtgcgctggatttcgccggtggcacggtggtgcacatcaatgccggtgtcgccggtctggtgggcgcctacttcgtgggcaagcgggccgggctcgggcgtgaggcgatcaagccgcacaacgtgaccctgaccttcgtcggtgcttcgctgctgtgggtgggctggttcggcttcaacgccggttccaacctggaagccaatgccggtgcggcgctggccttcctcaacaccttgctggccaccgcagccgcggtcctgggctggtcgctcaccgagaagatcatcaagggcaagtcctccgccctgggcgtggcctcgggcatggtcgccggcctggtcggcatcaccccggcctgcggcacggtgggcccgttcggcgcgatcatcattggcctggcggccggcgtgctgtgcgtgtggggcgtcactggcctcaagcgcctgcttggtgccgacgacagcctggacgtgttcggcgtgcatggcctgggcggcatcatcggcgcgatcctcaccggcgtgttctcggcggcctcgctcggcggccagaagggcggcgactacgacatgctgcatcaagtcggtatccaggcgctgggcgtgggcatcacggtgggctggatcggcgtggtgtcggtggtgggctttgtggtcgccaagctggtgttcggcctgcgcgtcaccgaagaagccgagcgtgaggggttggacatcacctcgcacggcgaagctgcttacgagtcctga

SEQ ID NO: 856 - protein, 491 aa, Xanthomonas campestris
  Xanthomonas campestris (pv. campestris)
MRSDPTHPGVPMKTGLVAGWKARFYSVCMLMLFSALVVGGLGNAQAQSGAQVTPLPTEPVTTEPLPTAQPAAAPVAAAEAAPVVEKGDVAWMLTSTLLVLLMVVPGLALFYGGMVRAKNVLSVLIQVAVVFSLLVVLWVFYGYSLAFSGEGPWIGNLDKALLKGVTIETLSATFTKGVSLPEYVFVAFQATFAGITGALIVGAFAERAKFAAVLLFSVIWFTFGYLPLAHMVWATGGYLFGLGALDFAGGTVVHINAGVAGLVGAYFVGKRAGLGREAIKPHNVTLTFVGASLLWVGWFGFNAGSNLEANAGAALAFLNTLLATAAAVLGWSLTEKIIKGKSSALGVASGMVAGLVGITPACGTVGPFGAIIIGLAAGVLCVWGVTGLKRLLGADDSLDVFGVHGLGGIIGAILTGVFSAASLGGQKGGDYDMLHQVGIQALGVGITVGWIGVVSVVGFVVAKLVFGLRVTEEAEREGLDITSHGEAAYES

SEQ ID NO: 857 - DNA, 1365 bp, Azoarcus sp.
  Azoarcus sp. BH72
  CDS (1)..(1365)
atgaacgatgtgcaattcccgaccgcagccgcggcccgaccacacccacgcggcaccgcggcaacggcggcgctgctgatgctcggcctgtccggcaccgcactggcgcaggaagccgcgccggccacgctcaacagcggcgataccgcctggatgatggtctccagcgtgctggtgctgatgatgctggtgcccggcctcgccctcttctacggcggcatggtgcgcgccaagaacgtgctgtcggtgttcacccagtgtttcggcgttgccggcgtgatcggcatgctgtgggtcatctatggctacagcatcttttccgacaccaccgccatggaggcgggcgtcgtcaacctgcacagcttcatcggcggcttcaagcaggccatctcgccaacatcgaccgcgccagcctcaccggccagcatcccggagagcgtgttcgccaccttccagatgaccttcgcgctgatcacccccgtgatcatcgccggctccttcgccgagcgcatgaagttcagcgcggtgctgctgttcaccgcgctgtggttcaccttctggtacgcgcccttggcgcacatggcgtggagcgccccgggcggccctgcttgggactggggcatcctggaattcgccggcggcaccgtggtgcacatcaacgccggcgtcgccgggctggtcgccgccctggtgctgggccgtcgccgcggctatccgcacgtcgccatgccgccgcacaacctgggcttcgcgctggctggcgcggcgctgctgtgggtgggctggttcggcttcaacgtcggctcggcggtcgccgccaacgagaacgccggcatggcgatgctcaccacccagatcgccgcctgcgccggcgtggtcggctggctggtggtggaatggctcaaggcgggcaagccgagcgcgctgggcgcggcctccggcgccctcgccggcctggtggcgatcaccccggcctgcggcttcgtcggtccgtccggcgcgctgtacatggggctgatcaccggcgccgtctgcttcttcgccatcggctggctcaagcgcaagctgggctatgacgacagcctgggacccttcggcctgcacggcatcggcggcatcgtcggctcgctgctgaccggggtcttcgcgtcgaagagcctgggcggcttccaggacatcgagatcgccagccaggtgcagatccaggcccagagcgtgctcttcacggtgctgtactgcgcgatcgtcacctgggtgctgctgaagctcaccgggctggtcacccgtggcctgcgggtgagcgcggacgacgagcaggaagggctggaccagagccagcacaacgagcgcgcctacaacgtctga

SEQ ID NO: 858 - protein, 454 aa, Azoarcus sp.
  Azoarcus sp. BH72
MNDVQFPTAAAARPHPRGTAATAALLMLGLSGTALAQEAAPATLNSGDTAWMMVSSVLVLMMLVPGLALFYGGMVRAKNVLSVFTQCFGVAGVIGMLWVIYGYSIFSDTTAMEAGVVNLHSFIGGFKQAISPTSTAPASPASIPESVFATFQMTFALITPVIIAGSFAERMKFSAVLLFTALWFTFWYAPLAHMAWSAPGGPAWDWGILEFAGGTVVHINAGVAGLVAALVLGRRRGYPHVAMPPHNLGFALAGAALLWVGWFGFNVGSAVAANENAGMAMLTTQIAACAGVVGWLVVEWLKAGKPSALGAASGALAGLVAITPACGFVGPSGALYMGLITGAVCFFAIGWLKRKLGYDDSLGPFGLHGIGGIVGSLLTGVFASKSLGGFQDIEIASQVQIQAQSVLFTVLYCAIVTWVLLKLTGLVTRGLRVSADDEQEGLDQSQHNERAYNV

SEQ ID NO: 859 - DNA, 1430 bp, Azoarcus sp.
  Azoarcus sp. BH72
  CDS (24)..(1430)
gccctgtaacggagaatcaaacaatgaaaaaactattcgcgatcctgctgacggccttaaccgtcggctttgcgggcggcgttatcgcccaggaaaacacggcggcgccgactgctccggccgccgtcgaggcgccggccgccaccgacgccgccccggctgcagctgaagccccggccgccgccgaagaagtcgtggccacggtcaacaagggcgacgtcgcctggatcatgaccgccaccctgctggtgctgttcatggccctgcccggcctcgcgctgttctacggcggcctcgtccgcaccaagaacatgctgtcggtgctgatgcaggtgatggtggtgttctcgctgatcgccgtgctgtgggccttctacggctacagcctggccttcaccgaggccagccccttcatcggctcgctcgacaagctgttcctgtccggggtgagcaacagcaccctcgccgacaccttcagcgccgatgcgaagctgccggagtacgccttcatcgccttccaggccaccttcgcgggcatcacctgcgcgctgatcgtcggctccttcgccgaacgcatcaagttctccgcggtgctgctgttctcggtgatctggttcaccttctgctacctgccgatctgccacatggtgtggggcccgggcggcttcctgctgggtgacggcgcgctcgacttcgccggcggtaccgtggtgcacatcaacgccggtgtcgccggtctggtgggtgcctacatggtcggcaagcgcatcggcttcggtcgcgaatccatggctccgcacttcgtgacgctgaccatggtcggtgcctcgatgctgtgggtgggctggttcggcttcaacgccggctccaacctggaagccaccgcgggtgccgcgctcgccttcatcaacaccctgctcgccaccgccgccgccgtgctggcctggtcgctgggcgaagcgatgttcaagggcaagccctcgatgctgggtgcggcctccggcgcggttgccggcctggtggcgatcaccccggcttgcggctcggtcggcccgatgggcgcgatcatcatcggcctgctcgccggcttcgtctgcctgtggggcgtcaatggcctcaagcgcatgctcggcgcggatgactcgctcgacgtgttcggcgtgcatggcctcggcggcatcctcggcgccatcctgaccggcgtgttcaccgcgccgtcgctcggcggcaccggtgccgaagacttcgcgatgggccaccaggtgtgggtgcagacctactcggtgctgatcaccatcgtctggtccgccgtggtcgccttcatcggctacaagatcgccgacatgttcgtcggtctgcgggtgccggaagaagaggaacgcgaaggcctggacgtgaccgcccacggcgaaaccgcgtaccactactaa

SEQ ID NO: 860 - protein, 468 aa, Azoarcus sp.
  Azoarcus sp. BH72
MKKLFAILLTALTVGFAGGVIAQENTAAPTAPAAVEAPAATDAAPAAAEAPAAAEEVVATVNKGDVAWIMTATLLVLFMALPGLALFYGGLVRTKNMLSVLMQVMVVFSLIAVLWAFYGYSLAFTEASPFIGSLDKLFLSGVSNSTLADTFSADAKLPEYAFIAFQATFAGITCALIVGSFAERIKFSAVLLFSVIWFTFCYLPICHMVWGPGGFLLGDGALDFAGGTVVHINAGVAGLVGAYMVGKRIGFGRESMAPHFVTLTMVGASMLWVGWFGFNAGSNLEATAGAALAFINTLLATAAAVLAWSLGEAMFKGKPSMLGAASGAVAGLVAITPACGSVGPMGAIIIGLLAGFVCLWGVNGLKRMLGADDSLDVFGVHGLGGILGAILTGVFTAPSLGGTGAEDFAMGHQVWVQTYSVLITIVWSAVVAFIGYKIADMFVGLRVPEEEEREGLDVTAHGETAYHY

SEQ ID NO: 861 - DNA, 1317 bp, Pseudomonas stutzeri
  Pseudomonas stutzeri (Pseudomonas perfectomarina)
  CDS (1)..(1317)
atgactctgcgaagattcgcagggctaggagcccttttgtctctgttaagcccaggcctggccatggcgcaggaggcaacgctggattcaggcgatacggcatggatgctgacggccactgcgctggtgctgttcatgaccatccccggactggcgctgttctacggcggcatggtccgctcgaagaacatcctctcggtgatgatgcagtgcttcgccatcaccggcctgatgagcatcctctggatggtctatggctacagcctcgcattcgataccaccggtatggaagcgggcgtcaccaacttcaattccttcgtcggtggtctggatcgcgccttcctcagcggcctgactcctgacagcctggtcggcgccttcccggaaagcgtcttcatcacgttccagatgaccttcgccatcatcaccccggcgctcatcgtcggcgccttcgccgagcgcatgaagttctcggcgatgctggtgttcatggacgtgtggttcaccctggtctatgcgccgatcgcgcatatggtctggggcggtgacggtggcctgatgtgggactggggcgtgctggatttcgccggtggcaccgtggtgcacatcaatgccggtatcgccggtctggtggcctgcctggtcctgggcaagcgcaagggcttcccgaccacgccgatggcaccgcacaacctggggctgaccctggtcggcgcggcgatgctgtggattggctggttcggcttcaacgccggttcggccgtggctgccaacggcaccgctggcatggccatgctggtcacccagatcgccaccgccgcagctgcgttgggctggatgttcgccgagtggatcggccacggcaaacccagcgcgctgggcatcgcctcgggcgtggtcgccggtctggtcgccatcaccccggctgccggcaccgtcgggccgatgggcgcgctgatcatcggcctggtctcgggcgtggtctgcttcttctgcgccaccagcctgaaacgcaagctcggctacgacgattcgctggatgcctttggcgtgcacggcgtgggcggcatcgtcggtgcgctgctcaccggcatcttcgccgcacccatgctgggcggtttcggtgaggtggagaacatcggcctgcagctgtggattcagttcaagggcgtgctcttcaccgtcgtctacaccggcatcgtcacctacctgatcctcaaggcgatcgacctggtgatgggcctgcgggtgaacgaggagcaagagaccatcggcctcgacctcagcctgcacaacgagcgcggctacaacctgtaa

SEQ ID NO: 862 - protein, 438 aa, Pseudomonas stutzeri
  Pseudomonas stutzeri (Pseudomonas perfectomarina)
MTLRRFAGLGALLSLLSPGLAMAQEATLDSGDTAWMLTATALVLFMTIPGLALFYGGMVRSKNILSVMMQCFAITGLMSILWMVYGYSLAFDTTGMEAGVTNFNSFVGGLDRAFLSGLTPDSLVGAFPESVFITFQMTFAIITPALIVGAFAERMKFSAMLVFMDVWFTLVYAPIAHMVWGGDGGLMWDWGVLDFAGGTVVHINAGIAGLVACLVLGKRKGFPTTPMAPHNLGLTLVGAAMLWIGWFGFNAGSAVAANGTAGMAMLVTQIATAAAALGWMFAEWIGHGKPSALGIASGVVAGLVAITPAAGTVGPMGALIIGLVSGVVCFFCATSLKRKLGYDDSLDAFGVHGVGGIVGALLTGIFAAPMLGGFGEVENIGLQLWIQFKGVLFTVVYTGIVTYLILKAIDLVMGLRVNEEQETIGLDLSLHNERGYNL

SEQ ID NO: 863 - DNA, 2195 bp, Chlamydomonas reinhardtii
  CDS (28)..(1647)
ctgacctaagttaaaatagacacaaacatgtcaggagactttggctctgagcccctgggctcgtgctcagtggaaaccgttacggccttgctcggctatgggctcgagcaggacagcatcacggcgctttgccagcccgaggggggcgctggttgcaccagcacagataactgcatgttccagtatctgatgggcgcgaccgcggacgcgcagagcacggccagcgatgtgggagtcgggctcgacgtgagcttcctgttgttcagcggctatctggtattcgtgatgcagctcgggttcgctgtgctgtgcgctggaagcatccgctccaagaactgcatgaatatcctgctgaagaacatgctggacgcctgcgtgggcgctatcggcttctatgtcttcggatacgcgttcgcgtacggccgcaagtatggacagaatagcaacggcttcattggcaactggaactttgcgctctcgtacacaactcagacgtcaatgagcggcaccgagttcaccacgtttggatggcaccagttcttcttccagtggagcttctgcgccgccaccaccaccatcgtgtctggcgcggtggccgagcgctgcaccttcatggcctacatgatctacgcgttcttcctctcctccttcgtctaccccgtcatcgtgcactgggtgtgggacggccagggctggctcagtgccttcaacacattccaggacggctacgccctgatcctcaagaccggtgccattgactttgcgggctcgggcgtcgtgcacatgacgggtgggattgcggcactcatgggtgcctggattatgggcccccgtgtcggtcgcttcgctaatgacggcacggtgaatgagatgaggggccactcctccacgctggttgtgatgggcaccttcctgttgtggttcggctggttcggattcaaccccggcagcaacctggtggtcgcctcccaggctgcggccacagtcgtgtcgcgtgtcgcagtgaccaccgctctggcaggtggcgcgggtggaatctccatgctcttctacaagttcctgaccgtcaaggcttgggacgtggtggcgacgtgcaatggcatcctggctggcctcgtggccgtcacggctagctgctccgtcattgagccctgggcggccatcatcactggggccatcggggcaatcatcttttccattgctgattacgtgacgctttacaagctgaaggtggacgaccccgtgagcgcctttgccctgcacggcgccgtgggcgcatggggcgtgttgttccccggcttcctggcggctccccactatgtggtagaggtgtacggtgcctacggattcggaatggatgcacgggagggcaagaggttcggtctgttctacggcggccacggccaggtgctgctggtgcagctcatcgaggtgctggccatctttgggtggactggattcatgatgggcagcttcttcttcatcctcaacaaggctgggctgctgcgtgtgcccctgcaggaggagatggcgggtctggatgcggctaactacagcaagagcgttggcagcaaggacccctccgtccactgcaccgttggtgtggacaagctggaaggcggcgcgctgggggagggcaaggcctgatgggcacgcggcaacgaatggccaactcggtttgatggaaatccttcttgactgcggcacatttgatgacccgctacaacaaagaaaagcatgataggctgataccagagaggcacggcagtcgtgtgatgctgcagtgtgctgtggccctgaccactcatgtttcttacttagagagtagtcctggagagtcagagaggcgtgcttgcgatcctcgcattctttttgcgtgcaatgcatatccatagaccatacagttcatatcgtacagttgctaccaggagtttatcagggtcccctcatcttcagcaggggaacccctgttatatagcaccctcgccaatggggcgactgaccgaccatccaaccggcttacagctccgcgcggggacatcttgccctgattggtgtgggcttgcattggccaggccatagcgacgcgagccagcataattgcatctgttgtcagaagctgcttcctagtccttagcacctccaacctgcgggcgtcaaggcgcctattgtaactgcattcgtgaaaaaaaaaa

SEQ ID NO: 864 - protein, 539 aa, Chlamydomonas reinhardtii
MSGDFGSEPLGSCSVETVTALLGYGLEQDSITALCQPEGGAGCTSTDNCMFQYLMGATADAQSTASDVGVGLDVSFLLFSGYLVFVMQLGFAVLCAGSIRSKNCMNILLKNMLDACVGAIGFYVFGYAFAYGRKYGQNSNGFIGNWNFALSYTTQTSMSGTEFTTFGWHQFFFQWSFCAATTTIVSGAVAERCTFMAYMIYAFFLSSFVYPVIVHWVWDGQGWLSAFNTFQDGYALILKTGAIDFAGSGVVHMTGGIAALMGAWIMGPRVGRFANDGTVNEMRGHSSTLVVMGTFLLWFGWFGFNPGSNLVVASQAAATVVSRVAVTTALAGGAGGISMLFYKFLTVKAWDVVATCNGILAGLVAVTASCSVIEPWAAIITGAIGAIIFSIADYVTLYKLKVDDPVSAFALHGAVGAWGVLFPGFLAAPHYVVEVYGAYGFGMDAREGKRFGLFYGGHGQVLLVQLIEVLAIFGWTGFMMGSFFFILNKAGLLRVPLQEEMAGLDAANYSKSVGSKDPSVHCTVGVDKLEGGALGEGKA

SEQ ID NO: 865 - DNA, 1494 bp, Oryza sativa
  Oryza sativa (japonica cultivar-group)
  CDS (1)..(1494)
atggcgtcgccgccgcagcccgggccgtacatgccggacctgccggcggtgccggcgtggctgaacaagggcgacaccgcgtggcagctggtggcggcgacgttcgtcggcatccagtcgatgcctgggctggtggtgatctacggcagcatcgtgaagaagaagtgggccgtcaactccgccttcatggcgctgtacgcctacgcgtccacgcttatcgtgtgggtgctcgtcggcttccgcatggcgttcggcgaccggctgctcccgttctgggccaaggccgggccggcgctgacgcaggacttcctggtgcaacgcgcggtgttcccggcgacggcgcactacggcagcgacggcacgctcgagacgccgcgcaccgagccgttctacgcggaggcggcgctggtgctgttcgagttcgagttcgcggccatcacgctggtgctgctcgccgggtcgctcctggggcggatgaacatcaaggcgtggatggcgttcaccccgctctggctcctcttctcctacaccgtcggcgcgttcagcctctggggcggcggcttcctctaccagtggggcgtcatcgactactccggcggatacgtcatccacctctcctccggcgtcgccggcttcaccgccgcctactgggtgggcccgaggctgaagagcgacagggagcggttctcgccgaacaacatcctgctcatgatcgccggcggcgggctgctgtggttgggctgggccgggttcaacggcggcgcgccgtacgcccccaacgtcaccgccacggtcgccgtgctcaacaccaacgtcagcgccgcgacgagcctcctcacctggacctgcctcgacgtcatcttcttcggcaagccctccgtcatcggcgccgtgcagggtatgatgacggggctcgtctgcatcacgcccggcgccgggctggtgcacacgtggtcagcgatgctgatgggcatgttcgccggcagcgtcccgtggttcacgatgatgatcctgcacaagaaatccaccttcctcatgaaggtcgacgacaccctcgccgtcttccacacccacgccgtcgccggcatcctgggcggcgtcctcacgggcctcctcgccacgccggagctctgcgctctcgattgcccgatcccgaacatgcgcggcgtcttctacggcagcggcatcggccagctcgggaagcagctcggcggcgcgctgttcgtcaccgtctggaacctcatcgtcaccagcgccattctcctctgcatcggcctcttcatcccgctccgcatgtccgacgaccagctcatgatcggcgacgacgcggcgcacggggaggaggcctacgctctgtggggggacggtgagaagttcgacgtgacgcggccggagacgacgaggacgggaggtgcaggcggcgcgggcagggaggacaccatggagcagaggctgaccaacatgggagccaggggtgtcaccattcagttgtag

SEQ ID NO: 866 - protein, 497 aa, Oryza sativa
  Oryza sativa (japonica cultivar-group)
MASPPQPGPYMPDLPAVPAWLNKGDTAWQLVAATFVGIQSMPGLVVIYGSIVKKKWAVNSAFMALYAYASTLIVWVLVGFRMAFGDRLLPFWAKAGPALTQDFLVQRAVFPATAHYGSDGTLETPRTEPFYAEAALVLFEFEFAAITLVLLAGSLLGRMNIKAWMAFTPLWLLFSYTVGAFSLWGGGFLYQWGVIDYSGGYVIHLSSGVAGFTAAYWVGPRLKSDRERFSPNNILLMIAGGGLLWLGWAGFNGGAPYAPNVTATVAVLNTNVSAATSLLTWTCLDVIFFGKPSVIGAVQGMMTGLVCITPGAGLVHTWSAMLMGMFAGSVPWFTMMILHKKSTFLMKVDDTLAVFHTHAVAGILGGVLTGLLATPELCALDCPIPNMRGVFYGSGIGQLGKQLGGALFVTVWNLIVTSAILLCIGLFIPLRMSDDQLMIGDDAAHGEEAYALWGDGEKFDVTRPETTRTGGAGGAGREDTMEQRLTNMGARGVTIQL

SEQ ID NO: 867 - DNA, 1883 bp, Oryza sativa
  Oryza sativa (japonica cultivar-group)
  CDS (87)..(1580)
gcacgagcttacatgtaagctcgtgccgaattcggcacgagcttacaatccaaacaatcacgtcggtcgacgagaagaagtgagtgatggcgtcgccgacccggccggggccgtacatgccgcgcccaccggcggtgccggagtggctgaacaccggggacaacgggtggcagctcgcggcggcgacgttcgtcgggctccagtcgatgcctgggctggtggtgctgtacggcagcatcgtgaagaagaagtgggccgtcaactcggccttcatggcgctgtacgcgtacgcgtccacgctcatcgtgtgggtgctggtcggcttccgcatggcgttcggcgaccggctgctcccgttctgggggaaggccggcgcggcgctgacggaggggttcctcgtggcgcgcgcgtcggtcccggccacggcgcactacgggaaggacggcgccctggagtcgccgcgcaccgagccgttctacccggaggcgtccatggtgctgttccagttcgagctcgccgccatcacgctggtgctgctcgccgggtcgctcctcgggaggatgaacatcaaggcgtggatggcgttcactccgctctggctcctcttctcctacaccgtctgcgccttcagcctctggggcggcggcttcctctaccagtggggcgtcatcgactactccggcggatacgtcatccacctctcctccggcatcgccggcttcaccgccgcctactgggtggggccgaggctgaagagcgacagggagcggttctcgccgaacaacatcctcctcatgatcgccggcggcgggctgctgtggctgggctgggccgggttcaacggcggcgcgccgtacgccccaaacatcaccgcgtccatcgccgtgctcaacaccaacgtcagcgccgcggcgagcctcctcacctggacctgcctcgacgtcatcttcttcggcaagccctccgtcatcggcgccgtgcagggcatgatgaccggtctcgtctgcatcacccccggcgcaggtctggtgcacacgtgggcggccatactgatgggcatctgtggcggcagcttgccgtggttctccatgatgatcctccacaagagatcggcgctgctccagaaggtggacgacaccctcgccgtcttccacacccacgccgtcgcgggcctcctcggcggcttcctcacgggcctgttcgccttgccggacctcaccgccgtccacacccacatccctggcgcgcgcggcgcgttctacggcggcggcatcgcccaggtggggaagcagatcgccggcgcgctcttcgtcgtcgtgtggaacgtcgtggccaccaccgtcatcctgctcggcgtcggcctcgtcgtcccgctccgcatgcccgacgagcagctcaagatcggcgacgacgcggcgcacggggaggaggcctacgcgctatggggagacggcgagaggttcgacgtgacgcgccatgagggggcgaggggcggcgcgtggggcgccgcggtcgtggacgaggcgatggatcaccggctggccggaatgggagcgagaggagtcacgattcagctgtagtggtggtagagtgggcattttgtcgcaggctttgccgcactgcagctaaactggacgttgaccatacgataattctcatctcgtacaggtagatcttgcaactagcaagatggagtagcagatattactaaacacatatgcttcattattttatttctggagtaaatcaagattcgttttggggtagtggtagatatttgcaatctgatgcagtcagtatgcaatgtgtcctaccctgggagtcccaatagataaacaaacttttgccagcattgcacacaagcaaaaaaaaaaaaaaaaaaa

SEQ ID NO: 868 - protein, 497 aa, Oryza sativa
  Oryza sativa (japonica cultivar-group)
MASPTRPGPYMPRPPAVPEWLNTGDNGWQLAAATFVGLQSMPGLVVLYGSIVKKKWAVNSAFMALYAYASTLIVWVLVGFRMAFGDRLLPFWGKAGAALTEGFLVARASVPATAHYGKDGALESPRTEPFYPEASMVLFQFELAAITLVLLAGSLLGRMNIKAWMAFTPLWLLFSYTVCAFSLWGGGFLYQWGVIDYSGGYVIHLSSGIAGFTAAYWVGPRLKSDRERFSPNNILLMIAGGGLLWLGWAGFNGGAPYAPNITASIAVLNTNVSAAASLLTWTCLDVIFFGKPSVIGAVQGMMTGLVCITPGAGLVHTWAAILMGICGGSLPWFSMMILHKRSALLQKVDDTLAVFHTHAVAGLLGGFLTGLFALPDLTAVHTHIPGARGAFYGGGIAQVGKQIAGALFVVVWNVVATTVILLGVGLVVPLRMPDEQLKIGDDAAHGEEAYALWGDGERFDVTRHEGARGGAWGAAVVDEAMDHRLAGMGARGVTIQL

SEQ ID NO: 869 - DNA, 1437 bp, Emericella nidulans
  Emericella nidulans (Aspergillus nidulans)
  CDS (1)..(1437)
atgtcgacttaccctgttgcctacaatgggaccggcgtgaacggtggtgactccctcagggaggatctcaacatctactacagttctggtgatattgcatgggttattacctcaaccgcgctagttcttctaatgataccgggtgtaggattcttctactccggtctcgctcgtcggaagtccgccctctccctgatatggctttcattgatgtctatcggtgtggtctcattccaatggttcttctggggttattcgttggccttttcccacactgccggaaagtacattggtaacttggataactttgggttcaagggtgtcctgggcgctccttcagtgggctcaaccaaggtccccgatcttctgtttgctgtctttcagggaatgtttgctgcgattaccgttgcacttgccgttggtgccgttgcagagcgtggtcgtatgcttccctgcatggttttcgtctttatctggagtaccatcatctacgaccccgttgcatgctggacctggaatgcttctggttgggtcttccagttaggaggcttggactttgctggtggcacgccagtccacattgtctccggtacgacggctctggcctactctttgatgctcggcaagcgtcgtggtcacggaactcatgagctcaactatcgccctcacaacgttactcatgttgtgattggcaccgtctttctttgggttggctggttcggtttcaacgccggctccgccttgagcgctaatctgcgtgctgtgatggctgctgtagtgacaaacttggctgcttctgtaggtggtgtcacctggtgcttgctcgactaccgtctagaaagaaagtggtcaaccgttggcttctgttccggtgtgatttccggccttgttgccattacccccggttctggcttcgtgactccctgggctgcgtttatcttcggcgttgtcggtgctgctgcttgcaacttcgcgactaaagtcaagtatctcatccgagttgatgatgctctcgatatcttcgctgtgcacggtatcggtggtcttgtcggtaacctcctgaccggtctcttcgcagctgactacattgcccacctggacggctctaccgagatcgacggcggctggatcaaccacaattacatccaactcggctaccaacttgccgattccgtcaccggcatggcctactccttcttcggcagctgcatcattctctttatcatcaacatgatccccggccttagcctgcgcgtccctgaagaagatgaagtccttggtatcgatgacgccgaaattggcgaatttgcttatgactacgtcgaactcacccgcgacgttattaacgggaccactgagccgatggacggcgcatccaagcgcagcaccactcccaccggacccgtcgaaccatcccctgccgagctcaaagcgtaa

SEQ ID NO: 870 - protein, 478 aa, Emericella nidulans
  Emericella nidulans (Aspergillus nidulans)
MSTYPVAYNGTGVNGGDSLREDLNIYYSSGDIAWVITSTALVLLMIPGVGFFYSGLARRKSALSLIWLSLMSIGVVSFQWFFWGYSLAFSHTAGKYIGNLDNFGFKGVLGAPSVGSTKVPDLLFAVFQGMFAAITVALAVGAVAERGRMLPCMVFVFIWSTIIYDPVACWTWNASGWVFQLGGLDFAGGTPVHIVSGTTALAYSLMLGKRRGHGTHELNYRPHNVTHVVIGTVFLWVGWFGFNAGSALSANLRAVMAAVVTNLAASVGGVTWCLLDYRLERKWSTVGFCSGVISGLVAITPGSGFVTPWAAFIFGVVGAAACNFATKVKYLIRVDDALDIFAVHGIGGLVGNLLTGLFAADYIAHLDGSTEIDGGWINHNYIQLGYQLADSVTGMAYSFFGSCIILFIINMIPGLSLRVPEEDEVLGIDDAEIGEFAYDYVELTRDVINGTTEPMDGASKRSTTPTGPVEPSPAELKA

SEQ ID NO: 871 - DNA, 1635 bp, Emericella nidulans
  Emericella nidulans (Aspergillus nidulans)
  CDS (1)..(1635)
atggcctctgaaggcatggctcccttcactcccgagtatgcctcgtacaactggacaggcgctccctcagactattccagcctggccaccaacgagctgggcggaaactcaagggtggaaaacttgaacaaatggtaccaatcgggtgaccaagcctacatcatcgttgcttcggccatggtcatgctcatggtgcctggcctcggattcctttactccggtctcgctcgccgcaagtcagccctcagcatgatctgggcttgtatgggctcgatgtgcgttgtaacattccaatggtacttctggggttactcgcttgctttctctcccaccgctacaaatggatacattggaaacctgcgcaatttcggtctgatgaaggttctggcggaccccagcccagggtctcctctggttcctaacctcctctacgccttctaccagatgcaattctgtgccgtaactgctgctatcattatgggagcggttgccgaacgtgggcgtcttcttcctgccatggtctttactttcgtctgggccacaatcgtgtactgccccatcgcttgctgggtatggaatgtcaacggctgggccttcaactatggcgtgctggattatgctggtggtggccccgtcgaaatctgctccggtctttcggcgctcgcatactctatggtcctcggtcgtcgccaggagcgcatgatgctcaacttccgcccccacaatgtttccctcattctgctcggtaccgtctttctctggttcggatggcttggattcaacggtggctcgtcattcggtgcaaacatgcgcgctacgatggcatgctggaacacaaacttgaccgctgcctttggcgcgatcacttgggttattctcgattggcgcctggctcgcaagtggtcgatggtcggttggtgttccggtacaatctccggtcttgtcgctgctactcctgcttccggtttccttcctccctgggctagtgttgttctcggtattgtgaccggcattgtatgcaactactccacgaaggtgaaatactggatccgtattgatgactctatggatgtgttcgccgagcacggtgttgctggtattgtcggtctcattttcaacgccttcttcgcagacgacgccatcgtcggccttgacggggtcaacaccggttctgaaatgggcggctggctcatccacaactggaagcaactttacatccaaatcgccttcatcgtcgctgcctccgcctactccttcgttgtgtcggccattgtcgcctacgccatcaacgccatcccaggcctgaagctccgtgcatccgaagaggccgaactcctcggcatggatgatgatcagctgggtgaattcgcttacgactatgttgaggtccgtcgtgactaccttgcctggacaccccagaagcacgaccaacacgcagacggtcatgaggttcctgctgccgcgaggtatggcatcggggagcacagcgagatgatgctcgacggtgaggctcccacaggtgcgaccaacagccgcggaagtgaggtatcaggcgtgcaagaaatcaatgtcaaggaagaatcgcaacggcctgcgccgccgaccgacgccgagaaggctgctcaggggctttaa

SEQ ID NO: 872 - protein, 544 aa, Emericella nidulans
  Emericella nidulans (Aspergillus nidulans)
MASEGMAPFTPEYASYNWTGAPSDYSSLATNELGGNSRVENLNKWYQSGDQAYIIVASAMVMLMVPGLGFLYSGLARRKSALSMIWACMGSMCVVTFQWYFWGYSLAFSPTATNGYIGNLRNFGLMKVLADPSPGSPLVPNLLYAFYQMQFCAVTAAIIMGAVAERGRLLPAMVFTFVWATIVYCPIACWVWNVNGWAFNYGVLDYAGGGPVEICSGLSALAYSMVLGRRQERMMLNFRPHNVSLILLGTVFLWFGWLGFNGGSSFGANMRATMACWNTNLTAAFGAITWVILDWRLARKWSMVGWCSGTISGLVAATPASGFLPPWASVVLGIVTGIVCNYSTKVKYWIRIDDSMDVFAEHGVAGIVGLIFNAFFADDAIVGLDGVNTGSEMGGWLIHNWKQLYIQIAFIVAASAYSFVVSAIVAYAINAIPGLKLRASEEAELLGMDDDQLGEFAYDYVEVRRDYLAWTPQKHDQHADGHEVPAAARYGIGEHSEMMLDGEAPTGATNSRGSEVSGVQEINVKEESQRPAPPTDAEKAAQGL

SEQ ID NO: 873 - DNA, 1215 bp, Methanosarcina acetivorans
  CDS (1)..(1215)
atgataaatactggttcaacaggctttatgctacttgcgacaagtcttgtgatgctcatgacccctggtctggcattcttttacggaggacttgcctgtaagagaaacattttaggaataatgatgcagagttttgtttctctcgggctgacaaccattttatggtttttcgtaggatattctctctgcttcagcggaggagaaggtgcaatcctaggaaacctggacaaaatgttcttgaacgggattgccccgacggatatgtttggagatgccgggttccccgagctcgtcttcgtagcttaccagatgatgtttgcaatcattaccccggccctgattacgggagcatttgcaaacaggattacttttaaggcttacattattttccttgtcgtctggcagctctttgtttactatccttttgtacacatggtctggggaggcggcctgcttgccgaaatgggggttatcgactttgccggtggaatcgtggttcatgcgacagccggatttgcagcccttgcctcagtgttttatgtaggctcgaggaaatataaggattcaaagccaaataatatccccttaatggctgtcggaactgcacttctctggttcggatggtacgggtttaatgcaggcagcgaactcaatgtggacgggattacagcccttgcattcctgaacagcgacattgcagcttcttttgcagctattacctggatgataatagaatggttaagggaaacaaaaccaaaattcgttgggcttatgaccggagctgttgcagggcttgcgacaattactcctgcagcagggcttgtttccatgcatgtggctgcattaatgggcatcctcggagctattgcctgctactttgcagtacatattaaaaacaggatgcaatgggatgatgccctggatgtatggggtgttcacggaataggaggagtaacagggacaattttacttggaatctttgcttcaactgccataaatccggtaggagccgacggactgttttacggtggcactgcattctttatcaaagaactttcagttgttttaggtgcttcaatttatgcatttatatttacctacattatgctgatgctcataaacgtaataactccggtcaaagtttcggatgaagaagagctggcagggctggatatctcaatgcatggcgaatgcgcctacgatgcgattcactga

SEQ ID NO: 874 - protein, 404 aa, Methanosarcina acetivorans
MINTGSTGFMLLATSLVMLMTPGLAFFYGGLACKRNILGIMMQSFVSLGLTTILWFFVGYSLCFSGGEGAILGNLDKMFLNGIAPTDMFGDAGFPELVFVAYQMMFAIITPALITGAFANRITFKAYIIFLVVWQLFVYYPFVHMVWGGGLLAEMGVIDFAGGIVVHATAGFAALASVFYVGSRKYKDSKPNNIPLMAVGTALLWFGWYGFNAGSELNVDGITALAFLNSDIAASFAAITWMIIEWLRETKPKFVGLMTGAVAGLATITPAAGLVSMHVAALMGILGAIACYFAVHIKNRMQWDDALDVWGVHGIGGVTGTILLGIFASTAINPVGADGLFYGGTAFFIKELSVVLGASIYAFIFTYIMLMLINVITPVKVSDEEELAGLDISMHGECAYDAIH

SEQ ID NO: 875 - DNA, 1209 bp, Methanosarcina acetivorans
  CDS (1)..(1209)
atgaggtggatagaaatggcaatcgtagcagcagataccgtatgggtattgatttcctctgcccttgtattattaatgcttccagggctcgcactgttttatggcggattggttcagcgtaagaatgtactgagcagcatgatgcattcatttgttgcaatgggtgtcatggctctcgaatgggtaataattggttactcgcttgcgtttgggagcggaaacggtttcataggcagcctggaacacgtattcctgaaaggaattgacccttactcggtaacagggacaattcccacatatgcatttattgcctttcagggaatgtttgcaataattacccctgcccttatctcaggggccattgtcggacgtgtcaagttcaaatcatacatcgcattcatcgccctctggggactcattgtctatgcaccggtctgccactgggtatggggcggtgggttcctcacaggagaagcccttgactttgcaggtggaacggtagtccatataacatcaggcatatcctcactggcaattctgaccttccttggaaagaggagagggtacggcatagattcgataaaaccgcacaatgtcaccctgactcttctggggaccgggctcctctggttcggatggttcgggttcaatgccggctcctctcttgctgcaaatgaaattgcagccctcgcattcattacaaccctcgtagcccccgcagctgcagggtttgtctggatgaccctggaatggatccacctggggcgccctactgccctcggatttgcaacaggcgtcctggcagggcttgttgccataaccccggctgcagggtttgttacccccatggcagcaattccgataggtgtggttacaagctttatctgctaccaggctgtaatgctcaagggaagattaggttatgatgattctcttgatgctttcggagtccacggagtaggcggaattagcggggcaattctgacaggcgtatttgcaagcatagggtcttcaggactccttctcggcaactccgagcaactgatgctccaggtagaaggcgttattgccacgcttgtttacgcaagtgtttgcacccttatcatcgggtttgtactccacaagacgatcgggctcaaggtaagcgagagcgaagaaaatatcgggcttgaccggacacaacacggagaagcagcatataacatttga

SEQ ID NO: 876 - protein, 402 aa, Methanosarcina acetivorans
MRWIEMAIVAADTVWVLISSALVLLMLPGLALFYGGLVQRKNVLSSMMHSFVAMGVMALEWVIIGYSLAFGSGNGFIGSLEHVFLKGIDPYSVTGTIPTYAFIAFQGMFAIITPALISGAIVGRVKFKSYIAFIALWGLIVYAPVCHWVWGGGFLTGEALDFAGGTVVHITSGISSLAILTFLGKRRGYGIDSIKPHNVTLTLLGTGLLWFGWFGFNAGSSLAANEIAALAFITTLVAPAAAGFVWMTLEWIHLGRPTALGFATGVLAGLVAITPAAGFVTPMAAIPIGVVTSFICYQAVMLKGRLGYDDSLDAFGVHGVGGISGAILTGVFASIGSSGLLLGNSEQLMLQVEGVIATLVYASVCTLIIGFVLHKTIGLKVSESEENIGLDRTQHGEAAYNI

SEQ ID NO: 877 - DNA, 2239 bp, Methanosarcina mazei
  Methanosarcina mazei (Methanosarcina frisia)
  CDS (537)..(1730)
gaataaaaattctctgatagaagagatgaaaaggggaagtctgggttttgaacccgggttgatcgaattcaataacgaatatttttacaggtttttgccccaaactgttcaaataattagcacatatttagatagaattaaatagaataaagtaggatagaggatacctactggtggtcgcgatgaaatacgtaattgcaatgataaggcctgaaaggcttgatgcagtcaaaagagagcttcagaaaatcgaagtgagcaggttgactgtatcatccgtttccggctatggcgctcaaaaaggatatatggaaatctacagagcgatggaatatgatgcaaacctgcttgaaaaaatcaagatcgaaatcgctgtaaatgacgaattccttgagccaacaattgaggcaataaaaactggagcaaaaggcagtgacggttacgttggaagcggaaagatcttcgtgctgccacttgaaaacgtgataaggatccgcacgaacgaaaccggacctgaggcaatttgagggttgaaaatggctataaacgaagcagacactgtatgggtattgctttcatcggcattggtattattaatggttcctgcgctggcactgttctacggagggcttgtccagcgtaaaaacgtcctgagcagcatgatgcattcattcgttgcaatgggcgtcctggctcttgaatggataataataggttactcccttgcgttttcagaaggcaactggtttattggcggccttgagaatgtgtttctgagcgggattgatccttactccgtaacaggtacgattcccacctatgcatttgttgcattccagggaatgttcgcaataattactcctgcacttatatccggtgccatagtagggcgtgtcaagttcaagtcttacatcgcgttcatcctgctctggggccttattgtctatgccccggtatgtcactgggtttggggcggcggattccttaccggagaagcccttgactttgcaggcggtacggttgtccacataactgcaggtatgtcttcacttgcaatactggcatacctcggcaagagaaggggatatggtgttgattccctgaagccgcacaacgttaccctgaccctcctcggagccggacttctctggttcgggtggttcgggttcaacgcaggctcggctcttgctgcaaacgaaatagcagcccttgcattcatgaccacgctcgttgctcccgctgcagcaggttttgtctggatggcgcttgaatgggcgcaccttggacgccccaccgcactcgggtttgcaaccggcatcctggcagggcttgtagggataactcctgctgccggatttgtcactccagtagccgcgattgccataggtgcgattgcaagcttcatatgttaccaggctgtgatgttcaaaaacaggctaggatacgacgattcacttgatgcatttggagttcacggagtcggcggaatagtcggtgcgatattaacaggcgtatatgcaagtgtaggcggagaaggcctacttctcgggaactctgcccagttgatgattcagcttcagggcgtggttatcacaattgtatacgcaatggcctgcaccctgctgataggatttgtactccataaaacgatagggctcaaagtcagtgaaagcgaagaaatcatagggcttgacaaaacccagcatggtgaagcagcatacaacatttgagttcgggtgaatcttcaccctggctctcaaacagatttttttatttcttaactgttttttatttcttaactgttttttatttcttaactgttttatatttcttaactgttttatatttcttaactgttttttatttcttaactgttttttagttcgcagaaaaacatgttttttagagaaagtatgtctgataaagagaagagggaattataattcctgagaacttttacgctgcttttatagaggatttaaaggaacactgtaaacatgaatatacgttttaagagatgcctggaagacaataaattaagggtcacatgacaggacggtttcatatgacagaaaaaatcccatctgagataattgatgaattggaacgcgcgaaccgtctgcatgaacaggcggtatgtgaccatgaaaaatgcagagaattcagcgaaagtctatccaaacttctgaccaggcttgaagacatgaaatactacaggacagcagacaggctgatgagt

SEQ ID NO: 878 - protein, 397 aa, Methanosarcina mazei
  Methanosarcina mazei (Methanosarcina frisia)
MAINEADTVWVLLSSALVLLMVPALALFYGGLVQRKNVLSSMMHSFVAMGVLALEWIIIGYSLAFSEGNWFIGGLENVFLSGIDPYSVTGTIPTYAFVAFQGMFAIITPALISGAIVGRVKFKSYIAFILLWGLIVYAPVCHWVWGGGFLTGEALDFAGGTVVHITAGMSSLAILAYLGKRRGYGVDSLKPHNVTLTLLGAGLLWFGWFGFNAGSALAANEIAALAFMTTLVAPAAAGFVWMALEWAHLGRPTALGFATGILAGLVGITPAAGFVTPVAAIAIGAIASFICYQAVMFKNRLGYDDSLDAFGVHGVGGIVGAILTGVYASVGGEGLLLGNSAQLMIQLQGVVITIVYAMACTLLIGFVLHKTIGLKVSESEEIIGLDKTQHGEAAYNI

SEQ ID NO: 879 - DNA, 1446 bp, Neurospora crassa
  CDS (1)..(1446)
atgtcgtccggccccgttgaaacgtacgagggggttgccggcgtcgccaacaatggaggcaacccccttctcgaagacctcaaccgatattattctgccggagatttcggatggatcatgacatgtacagccctcgtgctgctcatggttcccggtgtcggtttcttctacagcggtcttgcacgaagaaagtcagccttggccctcatctggctttccctcatgtcgatagccatcgtagggtttcaatggttcttctggggttactcgcttgccttctcccacaccggaagcgcctacatcggcaacctctccaactttggtctcatgaagaccctcgcccagccaagcgttggcagcggcaagatccccgaccttcttttctgcctctatcagggcatgttcgctgccatcactcccgcgctcgctattggcgcgtgcgctgatcgcggccgtatgcttcccgctctggtcttcatgttcatctggaccaccatcgtctacgaccccatcgcctactggacctggaacggcaatggttggtccttcaagatgggcggtctcgactttgcgggcggcacgcccgtgcacatcagctccggagccgccgccctcgcctactcgctcatgctcggcaagcgcaacggctacaacaaggtcaacggtctgccctatcgcccccacaatgtcacccacgtcgttctaggcaccgtattcctctgggtcggctggttcggttttaacggcggtagcgccctggccgccaacctccgcgccgtcatggcctgcatcgtcactcacattgctgcttgcgtcggtggcttgacttgggtcttgctcgattaccggctggagaggaagtggagcaccgtcggcttctgctccggtgccattgctggtcttgtcgccatcacccctgctgcgggttacgtccctccctggtcggctttcatctttggtgttgtcggcggtatcagctgcaactttgctactaagctcaagttccttctgggtattgatgaggcactcgatgtgtttgctgagcacggtgttggaggtattgtcggcaacttgttgactggtatctttgctgctgactacattgccgctctcgacggtgtctccatcggcgactcagccatcgccggcggctgggttaaccaccactacatccagctcgcctaccagcttgccgacagcgtcgccggcttctcttactccttcgtcatgacctgcgtcatcctcttccttctcaacctcgttcccggcctctctcttcgtgtcgaccaccaccaggaggacattggcctcgacgacgaccagcttggcgaattcgcatacgattatgtggaggtcactcgcagcttggatgttattcctggattaactgcccccaacagcacagctggtagcatcagcgggagggaccctgagaagcaggtctaa

SEQ ID NO: 880 - protein, 481 aa, Neurospora crassa
MSSGPVETYEGVAGVANNGGNPLLEDLNRYYSAGDFGWIMTCTALVLLMVPGVGFFYSGLARRKSALALIWLSLMSIAIVGFQWFFWGYSLAFSHTGSAYIGNLSNFGLMKTLAQPSVGSGKIPDLLFCLYQGMFAAITPALAIGACADRGRMLPALVFMFIWTTIVYDPIAYWTWNGNGWSFKMGGLDFAGGTPVHISSGAAALAYSLMLGKRNGYNKVNGLPYRPHNVTHVVLGTVFLWVGWFGFNGGSALAANLRAVMACIVTHIAACVGGLTWVLLDYRLERKWSTVGFCSGAIAGLVAITPAAGYVPPWSAFIFGVVGGISCNFATKLKFLLGIDEALDVFAEHGVGGIVGNLLTGIFAADYIAALDGVSIGDSAIAGGWVNHHYIQLAYQLADSVAGFSYSFVMTCVILFLLNLVPGLSLRVDHHQEDIGLDDDQLGEFAYDYVEVTRSLDVIPGLTAPNSTAGSISGRDPEKQV

SEQ ID NO: 881 - DNA, 2689 bp, Tuber borchii
  Tuber borchii (White truffle)
  CDS (386)..(1837)
ggcacgagcaaccaacgtgcggccggccctgattattctcgacactccagaaagcgtgcgttgcgagaaaataataaaggaagaggaaaaaaaggaaagaaatttaatacaaacaactaattcgtcgtcctaacccgtgcacgttttattcgaaccctttttctctcaccattttctactgttttgtccgacaaacctacctaccgcacctaccaacctacaaccgtccaaccaaccctccgcttcatccatcatacttgtacgagtactgtagctgtgcaactctatcaccgccctctacatttcactctgacactttgctacttgcgccaagataaaccttcaacttcaagcgggaatatacgagtagtagagtttagccacaatgaatgacccagatcatctcaattatgtcccacttgttcctttcaatggaactaaaccattcgggggtgattcactgactcaagacctgaacatttggtacgagagcggaaatgttgcctgggtcatgacctcgactgcgcttgttctgctgatgattccgggtgtcggattcttctattcgggactcgcgagaagaaagtcggctctttctctcatctggctgtcaatgatggcaaccgctgtagttagctttcagtggttcctttggggttattctttggctttctcgcatactggtggtagattcattggaaaccttgacaatttcggatttaagggacttctcggttatccttctattggaagtgagaaaattccggacctgctgtttgctctctatcagggaatgttctctgctattacggttgctctggctattggtgccgctgcagagagaggccgtatgttgccttgtgtagtttttatgtttgtctgggctactttgatttacgaccctattgcatgctggacgtggaattcctcgggatggtcgttcaggatgggtggattggattttgctggtggaacgccagttcatatttcatccggatccgccgccttggcctactctctgatgttgggaaagcgacgaggccatggaacacatgagttaaactaccgcccacacaatgtcactcacatcgttctcggaacagttttcctgtgggttggctggtttgggtttaacggaggatccgctctttctggcaacatgagagctgttatggcttgtgtcgtcactaatttggctgcatctgttggaggaattacttggtgtcttctcgattaccgtttggagcagaagtggtctactgtgggattctgttcaggagtcattgccggactggttgctattacccctggatctggatatgttccctcttgggctgctgttatttacggtgttgttggtggtgccgcatgtaactatgctaccaagctcaagtttgttattggcgtagatgatgctttggatatcttcgcggagcacggtgtcgggggtattgtaggaaatatcctgacagccttctttgcggctgattacattgcgcatcttgacggctctaccgagattaatggaggttggttgaacggacactataagcaacttggatatcaagttgcggactctgttgcgggttttgcatactccttcggaggcacttgtatcatcctcttcatcatgaatcttatccctggtttgagtcttcgtgctactgaggaggccgagattcttggtattgatgatgccgagctcggagagttcgcctatgactatgttgagcttactcgcgaagttatctctgacgatgacactgtacctaaaatgtcatcggagaacaatgcgagtgtagaactacctgctgaaagggctgagaagtctgcttaaagacttcatcgcttcctcttttcacaaacaatggatccacttgaattcaacactgttcatgtctttctttcttcctttctttcttcctcatcactttcaacgtgctgtgatttctgggcttcaactattcataagtatcaagggaggggggtcacgggaaaaaaaggaaatttaatcggtcacagtgatcagcttactggggaaaaatgaaatattttcctttttatattccctatttgttaattacttgtttcgggggcgtcttgttgttccctatagtgggggtgtgatttggatgaatgataggcttcaataccctcttattttttcttctcgctttttctgtctgggtgcggctctgtctacttttgctcttttttgctttctcacaacttttatttggtctggtcttggtttctctttttctttttttatatatctataaaaaaaaaaaagaagctcctgcttgaatagaagaggaagcaaggtgtcgagaattattgttcgcctttggcaccaatgcttgtagcgttttactctttcttttttaaatttctttcctactgttgatattaactttctactttttttgcccaattcttctttcttctttaccttacattacattttttatttcttaactatgataccggtagagcaacaggtggcagtgggtgtacctttacttgtctgggaggggggttttttttaatgaaaccttgcacgagcgagccggatgtgtgatgaaggaggggtgggggtggatgtacagatttctagggctgtattgtatgtacttgctgtatatgcaggtggataatttttttccctctcaaaaaaaaaaaaaaaaaa

SEQ ID NO: 882 - protein, 483 aa, Tuber borchii
  Tuber borchii (White truffle)
MNDPDHLNYVPLVPFNGTKPFGGDSLTQDLNIWYESGNVAWVMTSTALVLLMIPGVGFFYSGLARRKSALSLIWLSMMATAVVSFQWFLWGYSLAFSHTGGRFIGNLDNFGFKGLLGYPSIGSEKIPDLLFALYQGMFSAITVALAIGAAAERGRMLPCVVFMFVWATLIYDPIACWTWNSSGWSFRMGGLDFAGGTPVHISSGSAALAYSLMLGKRRGHGTHELNYRPHNVTHIVLGTVFLWVGWFGFNGGSALSGNMRAVMACVVTNLAASVGGITWCLLDYRLEQKWSTVGFCSGVIAGLVAITPGSGYVPSWAAVIYGVVGGAACNYATKLKFVIGVDDALDIFAEHGVGGIVGNILTAFFAADYIAHLDGSTEINGGWLNGHYKQLGYQVADSVAGFAYSFGGTCIILFIMNLIPGLSLRATEEAEILGIDDAELGEFAYDYVELTREVISDDDTVPKMSSENNASVELPAERAEKSA

SEQ ID NO: 883 - DNA, 1311 bp, Ralstonia solanacearum
  Ralstonia solanacearum (Pseudomonas solanacearum)
  CDS (1)..(1311)
atgcccaacaagggcgacacggcgtggctgctggtttcgaccgccttcgtgatcctgatgacgctgccgggcctggcgctgttctacggcggcctggtgcgcaagaagaacatgctgtcggtcctgatgcaatgtaccggcatcttctcgctcatcatgatcctgtgggccatctacggctacagcatcgccttcaccgagggcaatgccttcttcggcgggctcgaccggctgttcctgaagggtctgacgccggattcggttgccgctacgttcagcaagggcgtggtagtgccggagtatgcgtacttcgccttccagggcgcatttgccgcgatcacctgcgcgctgatcatcggtgccttcgccgagcgcgccaagttctcggccgtgctggtcttcgtggtgctgtggttcacctttgcctacctgccgatcgcccacatggtctggttctggccggggccggacggcttcaccgacgccaaggcggccgaagtgatgacggccaagggcggctggctgttccagaagggcgcgctggacttcgccggcggcaccgtggtgcacatcaacgccgccgtggcgggcctggtgggtgccttcctgttcggcaagcggatcggcttcggccgcgaagcgctcaagccgcatagcctgacgctgaccatggtcggtgcctcgctgctgtggttcggctggttcggcttcaacgccggttcggccctggaagccaacggcagcgccgcgctggccttcgtcaacacgctgctcgccaccgccgccgccgtgttgtcgtggagcttcggcgagtggatcggcaagagcaagccgtcaatgctgggtgccgcgtcgggcgccgtcgccggcctggtggcgatcaccccggcagccggcttcgtcggcccgatgggcgccatcgcgatgggcatcctcgccggcgtgctgtgcctgtggggcgtcaacggcctcaagcgcatgctgggcatggacgacacgctggacgtgttcggcgtgcacggcgtgggcggcatcatgggcgcgctgctgaccggcgtgttcgcctcgccgagcctgggcggcaccggcatctacgactatgtcgccaacaaggtggccgatggctactcgatcggcggtcagctgtggattcagctgcagggcgtgctgaccaccatcgtgtggtctgccgtggtggctttcgttgcctacaagatcgtggacgcgatcatcggtctgcgcgtgccggaagaagaggagcgcgaaggtctggacatcacgtctcacggcgaaaccgcttacgaagactga

SEQ ID NO: 884 - protein, 436 aa, Ralstonia solanacearum
  Ralstonia solanacearum (Pseudomonas solanacearum)
MPNKGDTAWLLVSTAFVILMTLPGLALFYGGLVRKKNMLSVLMQCTGIFSLIMILWAIYGYSIAFTEGNAFFGGLDRLFLKGLTPDSVAATFSKGVVVPEYAYFAFQGAFAAITCALIIGAFAERAKFSAVLVFVVLWFTFAYLPIAHMVWFWPGPDGFTDAKAAEVMTAKGGWLFQKGALDFAGGTVVHINAAVAGLVGAFLFGKRIGFGREALKPHSLTLTMVGASLLWFGWFGFNAGSALEANGSAALAFVNTLLATAAAVLSWSFGEWIGKSKPSMLGAASGAVAGLVAITPAAGFVGPMGAIAMGILAGVLCLWGVNGLKRMLGMDDTLDVFGVHGVGGIMGALLTGVFASPSLGGTGIYDYVANKVADGYSIGGQLWIQLQGVLTTIVWSAVVAFVAYKIVDAIIGLRVPEEEEREGLDITSHGETAYED

SEQ ID NO: 885 - DNA, 1356 bp, Rhizobium meliloti
  Rhizobium meliloti (Sinorhizobium meliloti)
  CDS (1)..(1356)
atgtcgtcattcaccctttccacctctcttcgacgcgtgggagcgaccgctgccgcgatgctcgcgccggtcgttgcatttgcccaggaagccgcgcccgccgcggccgcaacaccggtgccggacaaggccgacaccaccttcatgttcctttcgacgcttctcgtcctgttcatgctgatcccgggcctcgccctattctacggcggcctcgtgcgcgccaagaacatgctgtcggtgctgatgcagtgcacggtgatcggcgccgccatgatgatcgtctgggtcgtctacggttattccttcgccttcggcggctcgacgagcgcctatttcggcggcttcgccaagctcttcctcgcgggcgtgaccgtcgacagcaccgcggcgaccttctccgatggcgtcgtcattccggagtatctgttcatgctgttccagatgaccttcgccgcgatcaccccggcactcatcgtcggcgcctttgccgagcgcatcaagttctcggccgcgatcctcttcgccatcctctgggcgacattcgtctatttcccgatcgcgcacatggtctgggacgcaaacggcctgctcttcggcatgggcgcgctcgatttcgccggcggcaccgtggtccacatcaatgccggcgtcgccggcctcgtcggtgcattcatggtcggcaagcgcaccggctacggccgtgacatgatggccccgcattccatgaccctgacgctcgtcggcgctgccatgctgtggttcggatggttcggctttaacgccggctccaatctcgaagcctccggcggtgcggttctcgccaccgtcaacaccttcctcgcaacggctgccgcagtcctttcgtggtcgctcgtcgagacgctgacgcgcggcaaggcgtcgatgctcggcgccgcttcgggcatgatcgccgggctcgtcgccgtcacgccggcggccggtatcgccggtccgatgggcgcgatcatcatgggcctgatcgtctcgccgctctgctacttcttcgtctcggtgatcaagaacaagttccactatgacgacacggcagacgtcttcggcgtgcacggcgtcggcggcttcttcggcgcgatcgcgaccggcgtcttcgcctcctcctcgctcggcggcatcggctatgccgacggcgtgaccatgggaagccagctgatgacccagatcacggccgtcgccatcacgatcgtctggtgcggtgtcgtttccgccatcctctacaaggtggtcgatgcgcttgtcggccttcgcgtatcgatggaagcggagcgggaagggctcgacctctcctcgcatggcgaagccgcctatcacgcgagctga

SEQ ID NO: 886 - protein, 451 aa, Rhizobium meliloti
  Rhizobium meliloti (Sinorhizobium meliloti)
MSSFTLSTSLRRVGATAAAMLAPVVAFAQEAAPAAAATPVPDKADTTFMFLSTLLVLFMLIPGLALFYGGLVRAKNMLSVLMQCTVIGAAMMIVWVVYGYSFAFGGSTSAYFGGFAKLFLAGVTVDSTAATFSDGVVIPEYLFMLFQMTFAAITPALIVGAFAERIKFSAAILFAILWATFVYFPIAHMVWDANGLLFGMGALDFAGGTVVHINAGVAGLVGAFMVGKRTGYGRDMMAPHSMTLTLVGAAMLWFGWFGFNAGSNLEASGGAVLATVNTFLATAAAVLSWSLVETLTRGKASMLGAASGMIAGLVAVTPAAGIAGPMGAIIMGLIVSPLCYFFVSVIKNKFHYDDTADVFGVHGVGGFFGAIATGVFASSSLGGIGYADGVTMGSQLMTQITAVAITIVWCGVVSAILYKVVDALVGLRVSMEAEREGLDLSSHGEAAYHAS

SEQ ID NO: 887 - DNA, 1655 bp, Lotus japonicus
  CDS (37)..(1497)
tgaacaggttgaaggtttcaagctaaggctgcagccatggcaactcccacagcttaccaagaaaaccttccagcatcaccagaatggctaaacaaaggagacaacgcatggcaaatgacagcagcaactctggttggcctccaaagcatgccaggcctagtgattctctatgccagcatagtcaaaaagaaatgggcagtgaactctgctttcatggccctctatgctttcgcagcggttctcttatgttgggtccttttgtgttaccgtatggcatttggagacaagcttttccctttctggggaaagggtgcaccagcactaggccagaaatttctcataaaccaagccagtgtccctgaaagcacacactacttcaacaatggttccattgaaacccaaactcaaaggcctttttatcccatggctactcttgtgtatttccagttcaattttgctgctattacaatgattttgctggctggatctgtgcttggcagaatgaacatcaaggcttggatggcttttgttcctctctggctcattttctcatacactgttggggcatttagtatttggggtggtggttttctgtaccactggggtgtcatcgatttttctggtggctatgtcatccatctttcctctggaatcgccggtttcactgccgcttactgggttggaccaaggttaaagagtgacagggagaggttcccaccaaacaatgtgttgcttatgctagcgggtgctgggttgctgtggatgggttggtcagggttcaatggaggagcaccatatgcagccaacattgatgcttctattgctgtgctcaacactaacatatgtgcagccactagcctccttgtctggacctctctggatgttgccttcttcggcaagccttcagtcatcggtgccgttcagggcatgatgaccgggcttgtttgcatcacccccggagcaggacttgtgcaatcgtgggcggctatagtgatgggaatactatctggaagcattccatgggtctccatgatgatccttcacaagaagtcaagtcttctacagaaggtagatgatacacttggagtgtttcacacacatgctgtggctgggcttttgggtggcctcctcacaggtctgttagcagaaccagaactttgcaggctcgtattgccggtgagtaactcaaggggcgccttctacggtggcaccggcggtgcacagttcttgaagcaattggtggcagcactcttcgtcattggatggaacttggtttccaccactctcattcttcttgccattcaattgttcattcccttgaggatgccggactaccagctcgagattggtgatgacgccgttcatggtgaggaagcttatgccctgtggggtgatggagaaaaatatgatccaaccaagcatggatccacaatagtggatgaaactctagcatcggcctatagtgttggagcaaggggtgtaaccgtaaatttatgagtcatgtaaagacagtttataatgctaacggattaggatcattttgtgtcacctaacactatcatctgaaacttgtgtgtttatatttgttcataaatatttagaggatcgaggatctcacatatttaaaaaaaaaaaaaaaaaaaaaaaaaaaaaaa

SEQ ID NO: 888 - protein, 486 aa, Lotus japonicus
MATPTAYQENLPASPEWLNKGDNAWQMTAATLVGLQSMPGLVILYASIVKKKWAVNSAFMALYAFAAVLLCWVLLCYRMAFGDKLFPFWGKGAPALGQKFLINQASVPESTHYFNNGSIETQTQRPFYPMATLVYFQFNFAAITMILLAGSVLGRMNIKAWMAFVPLWLIFSYTVGAFSIWGGGFLYHWGVIDFSGGYVIHLSSGIAGFTAAYWVGPRLKSDRERFPPNNVLLMLAGAGLLWMGWSGFNGGAPYAANIDASIAVLNTNICAATSLLVWTSLDVAFFGKPSVIGAVQGMMTGLVCITPGAGLVQSWAAIVMGILSGSIPWVSMMILHKKSSLLQKVDDTLGVFHTHAVAGLLGGLLTGLLAEPELCRLVLPVSNSRGAFYGGTGGAQFLKQLVAALFVIGWNLVSTTLILLAIQLFIPLRMPDYQLEIGDDAVHGEEAYALWGDGEKYDPTKHGSTIVDETLASAYSVGARGVTVNL

SEQ ID NO: 889 - DNA, 1497 bp, Oryza sativa
  Oryza sativa (Rice)
  CDS (1)..(1497)
atgtcgggggacgcgttcaacatgtcggtggcgtaccagccgtcggggatggcggtgccggagtggctgaacaagggcgacaacgcgtggcagatgatctcggcgacgctggtggggatgcagagcgtgccggggctggtgatcctgtacggcagcatcgtgaagaagaagtgggcggtgaactcggcgttcatggcgctctacgccttcgccgccgtgtggctgtgctgggtcacctggggctacaacatgtcgttcggccacaagctcctcccgttctggggcaaggcgcggccggcgctgggccagagcttcctcctcgcccaggccgtgctcccgcagacgacgcagttctacaagggcggcggcggcgccgacgccgtggtggagacgccatgggtgaacccgctctacccgatggccaccatggtgtacttccagtgcgtgttcgccgccatcacgctcatcctcctcgccggctcgctgctggggcggatgaacatcaaggcgtggatgctgttcgtcccgctctggctcaccttctcctacaccgtcggcgccttctcgctgtggggcggcggcttcctcttccactggggggtcatggactactccggcggctacgtcatccacctctcgtcgggtgtcgccggcttcaccgcggcgtactgggtggggcccaggtcgaccaaggacagggagaggttcccgccaaacaacgtgctgctcatgctcaccggcgccggcatactgtggatggggtgggcggggttcaacggcggcgacccgtactccgccaacatcgactcctcgctcgccgtgctcaacaccaacatctgcgccgccaccagcctcctcgtctggacttgcctcgacgtcatcttcttcaagaagccgtccgtcatcggcgccgtccagggcatgatcaccggcctcgtctgcatcactcccggcgcaggcctggtgcagggttgggcggcgatcgtgatgggcatcctctccggcagcatcccgtggttcacgatgatggtggtgcacaagcggtcgcgcctcctgcagcaggtggacgacaccctgggcgtcttccacacccacgccgtcgccggattcctcggcggcgccaccacgggcctcttcgccgagcccgtcctctgctccctcttcctccccgtcaccaactcccgcggcgccttctaccccggccgcggcggcggcctccagttcgtccgccaggtggccggcgccctcttcatcatctgctggaacgtggtggtcaccagcctcgtctgcctcgccgtccgcgccgtggttcccctccggatgcccgaggaggagctcgccatcggcgacgacgccgtgcacggggaggaggcgtacgcgctgtggggcgacggcgagaagtacgactccaccaagcacggatggtactccgacaacaacgacacgcaccacaacaacaacaaggccgcgcccagcggcgtcacgcagaacgtctga

SEQ ID NO: 890 - protein, 498 aa, Oryza sativa
  Oryza sativa (Rice)
MSGDAFNMSVAYQPSGMAVPEWLNKGDNAWQMISATLVGMQSVPGLVILYGSIVKKKWAVNSAFMALYAFAAVWLCWVTWGYNMSFGHKLLPFWGKARPALGQSFLLAQAVLPQTTQFYKGGGGADAVVETPWVNPLYPMATMVYFQCVFAAITLILLAGSLLGRMNIKAWMLFVPLWLTFSYTVGAFSLWGGGFLFHWGVMDYSGGYVIHLSSGVAGFTAAYWVGPRSTKDRERFPPNNVLLMLTGAGILWMGWAGFNGGDPYSANIDSSLAVLNTNICAATSLLVWTCLDVIFFKKPSVIGAVQGMITGLVCITPGAGLVQGWAAIVMGILSGSIPWFTMMVVHKRSRLLQQVDDTLGVFHTHAVAGFLGGATTGLFAEPVLCSLFLPVTNSRGAFYPGRGGGLQFVRQVAGALFIICWNVVVTSLVCLAVRAVVPLRMPEEELAIGDDAVHGEEAYALWGDGEKYDSTKHGWYSDNNDTHHNNNKAAPSGVTQNV

SEQ ID NO: 891 - DNA, 1479 bp, Hebeloma cylindrosporum
  CDS (1)..(1479)
atgagtaatttagctaccggccagttcgaccgtggtgacatatctttcatcgtcgtcgcgggcgccatggtgttcttcatggtgcccggtctggctttcctttattccggcctttctcgtcgcaaaagtgcactgtctcttatatgggccgttgcagcgagcaacgccgtcgtgatattccagtggtatttcgtcggctactctctggcgttctccagcacggcgacaaacggctacattggaaacctgagaaattttgggctcatgaaggttgaggctgatccctctccgggctcccctctcattcccgagattctttacagtttcttccagatggaattcgcatgcgtaaccgccggtattctaatgggcggtctcgccgaacgtggtcgcgttttcccggccatgattttcatatttttttggatgaccttcgtctactgccctcttgcttgttgggcatggagcacgcatggctgggcttttaaatggggtgttcttgattttgcaggcggtggtcccgttgagattggaagcggtgttggtggcctggcctatgcctgggtccttggtcgcaggaacgaacgagaattgcttaacttccgtcctcataacgttggcctggttggcttgggaaccttcatgctatggtttggatggatcgggttcaacggaggaagtgcttttggtgcaaatctccgcgccatctttgccatttggaataccatgattgctgcgtcattcgggggcatggtttggtgccttctcgatttccgcatcgagcgtcggtggagtatggtcggattttgctccggtacgatcgccggtcttgttgcagctacaccttcctctggctacttgagaccatggtcgtcagttgtggtcggagttcttgcgggcaccttgtgtaattttgctaccaaagtcaagtttttgttgcgaatcgatgacgcgctcgatctattcgcggaacacgctgtaggtggcgttgttggtttgatgttgaacgcattctttgccgaaactgccgttattgccatggacgatgttaccatcggagttcgtggtggttgggtcgatcacaattggaagcaactttatattcagtttacctatgtggttgcgacttgcgcctactcttttgtcatgactgctctggtggcaaaaaccgtcgatctgatccctggcctgaaactcagaagtagtccagaaggcgagatgcttggtatggacgaggttgagatcggagaattcgcaactgattacattgaattgcgccgggacgttgcggactgttcgactttcggtttcacaagaggttctaatggatacatcccacatgctgcgacgaatgaaacacacgctcaagatactagttctaacgacgacccgcatcatcgtatcgatgaacccacggcgcctgaacgtttggaacccctcaccgaaaaaaatgaatgtgggaccgtgactccatcataa

SEQ ID NO: 892 - protein, 492 aa, Hebeloma cylindrosporum
MSNLATGQFDRGDISFIVVAGAMVFFMVPGLAFLYSGLSRRKSALSLIWAVAASNAVVIFQWYFVGYSLAFSSTATNGYIGNLRNFGLMKVEADPSPGSPLIPEILYSFFQMEFACVTAGILMGGLAERGRVFPAMIFIFFWMTFVYCPLACWAWSTHGWAFKWGVLDFAGGGPVEIGSGVGGLAYAWVLGRRNERELLNFRPHNVGLVGLGTFMLWFGWIGFNGGSAFGANLRAIFAIWNTMIAASFGGMVWCLLDFRIERRWSMVGFCSGTIAGLVAATPSSGYLRPWSSVVVGVLAGTLCNFATKVKFLLRIDDALDLFAEHAVGGVVGLMLNAFFAETAVIAMDDVTIGVRGGWVDHNWKQLYIQFTYVVATCAYSFVMTALVAKTVDLIPGLKLRSSPEGEMLGMDEVEIGEFATDYIELRRDVADCSTFGFTRGSNGYIPHAATNETHAQDTSSNDDPHHRIDEPTAPERLEPLTEKNECGTVTPS

SEQ ID NO: 893 - DNA, 1416 bp, Hebeloma cylindrosporum
  CDS (1)..(1416)
atggtgaatgtcacctacgacgcctctcagccactcgtatggactgacgctgccggaaacactggtgtctatagcccaggagatatcgcctgggtcctagcttcaactgcgttggtatggataatggtccccggtgttggattcttctattctggattgcttcggcggaagaatgctctgtctatgatatacctgagcatgatgacagtagccgtggtgtctttccaatggttcttctggggtttctcgcttgcttttagcgacggtgctagtctgttcatcggagacctaaaatatttcggcatgaaaggcgtcctcgaagagccttccattggaagtacacgtataccggccatcgttttcagtgtctatcagctcatgttcgcggctattacaccaatgatcgcggtcggtggtttcgccgaacgcgcgcaccttggacccctgcttttcttcgtttttgtgtggtcaaccctcgtttatgaccccattgcatgctggacatggaactccaaaggctggtctttcgtccacggaagctacgacttcgccggtggaacacctgtccacatctcttctggcacggccgccctcgctatttccatctacctcggaaaacgacgcggatacggcactgaagtgcttacatataagcctcacaacactacctacgttatccttggaactattttcctttggtttggatggttcggattcaacggaggctccgcccttgcagctaacttgcgagcggcccaggcttgtatcgttaccaatttggccgcgagtgttggtggactgacctggatgctttgggactatcgtattgaaaaaaaatggtcggctgtcggcttttgctcaggcgctatcgcaggcctcgtcgccattactcccggctctggtttcgtgggttcccctgctgccgttttattcgggttcatggccggtacagtgtgcaatttcgcgacccaactcaagttctttgctggatatgacgactccctcgatatcttcgcttcccatgccgtcggaggtgtcgtcggtaatctgctaacggcgctcttcgcacaagccagcgtcgctggtttcgatggcttcaccgtcatccctggaggttggttggaccgccactacatccagctcgcatggcacgtcgccgactcggctgcgggcctcagttattcatttgtggtgactactatcatcctctgggtcatgcactttatccccggtctccgccttcgcgtcccagaagaaaccgaaataataggtatcgacgaagccgacatgggcgaattcgcctacgactacgtaggcctggagaccgagctcaagccacatgtatacgtgcgctcaacaggaacagcttatgactccggccggaactccgagctcaaggaacgctcaagtgcctag

SEQ ID NO: 894 - protein, 471 aa, Hebeloma cylindrosporum
MVNVTYDASQPLVWTDAAGNTGVYSPGDIAWVLASTALVWIMVPGVGFFYSGLLRRKNALSMIYLSMMTVAVVSFQWFFWGFSLAFSDGASLFIGDLKYFGMKGVLEEPSIGSTRIPAIVFSVYQLMFAAITPMIAVGGFAERAHLGPLLFFVFVWSTLVYDPIACWTWNSKGWSFVHGSYDFAGGTPVHISSGTAALAISIYLGKRRGYGTEVLTYKPHNTTYVILGTIFLWFGWFGFNGGSALAANLRAAQACIVTNLAASVGGLTWMLWDYRIEKKWSAVGFCSGAIAGLVAITPGSGFVGSPAAVLFGFMAGTVCNFATQLKFFAGYDDSLDIFASHAVGGVVGNLLTALFAQASVAGFDGFTVIPGGWLDRHYIQLAWHVADSAAGLSYSFVVTTIILWVMHFIPGLRLRVPEETEIIGIDEADMGEFAYDYVGLETELKPHVYVRSTGTAYDSGRNSELKERSSA

SEQ ID NO: 895 - DNA, 1771 bp, Ustilago maydis
  Ustilago maydis (Smut fungus)
  CDS (149)..(1735)
ccctttccccttctctcttctctcttgctccattccccctccgttctccagctgcttccaagcttgtcgtcatcctcgatccgtctgactcgagtcgcgcctcgcctcgcctcgcctcgcctcgccttggtcgcagtttgtctacaaaatggtcaacatcacttacggtgtgcttcaagcacccgatggctcctcggctacctcgagcgccatcgccaagggaactgacattatcgtttcttacggcccaaatggcgagagcgtcgcttcctattcgcccggtgacatttcctgggttctcacatgtaccgctctcgtatggctcatgattcccggtctcggttacctctactctggtcttgctcgcagaaagaacgcgcctcacctccttttgctcactttggccgctctcgccgttgtctcgttccagtggttcttttggggctactcgctcaccttttctcaaacctcaggcgctttcctcggcaatctgcgcaactttggctacatgggtgttctcgaaaatcccgtgcctcaggcatacaacaaagtgcccgaaattgtatacgccatctaccagtgcatgttcgccaaccttgtccccgccatcgccatcggtgccgcttgtgagcgtggccgtgtctggcctttcctcgtctttacctttgtctggaccacgctcgtctacgatgtgatcgcctgctgggtctggaaccccaccggttgggcgttcaagtggggtgttcttgactacgccggtggtggacccgtcgagattaactcgggtatcactggtctcgtcatctcttactatcttggccctcgtaccggttatggcaccgagcgtctactcttcaagccacacaacgtttcctacatcttcctgggcaccgccttcctctggttcggctggatcggcttcaacggtggttcggtctttgctgccaacctccgtgcggctatggccatcagcaccaccaacctcgccgcttcgtccgccggtctcacctggatgttcctcgactggcgtctcgaacgcaagtggtccgtcgttggcttctgcacgggtgccattgctggtctcgtcgccatcactcccgctgctggctttgtcggcatgcccgctgctttgctcgtcggagtcgtttcctcggccgtttccaactttgccaccgttctcaagggccccatgcgcgttgacgatgtcatggacattttctcggtccacgctctcgccggtattgttggcacccttctcaccggtatcttcgcccaggcttccgtagccaacaacgacggcaacacggtcatcgccggtggctggctcgactcaaactggatccagctcgcctatcaactcgcctactgtgtcgctgtcacctgttggtgtggtggcgtcacgtttgctatcatgtttgttattgaccacattccttacatcggtcccttccgttcgagcgagatgggtgaagtggtgggtatggatgaggaccagtgtggcgagtgggcttacgactacgcctttatcaaccgtgatcttgagggcaactacaagcccgaccacggtcagacgctcgacatcaacgaaaagatgcccaacgttcatcaaaccgactcgctgcgctccgaaacgcacgccgactcgagccaagacaaccccaactcgcagctcgccgctgccgaacaccagtctccatccaccgctgaaccagccgtggaaatgaagcaggcttaaaagttgcaaagacgtcgtagagtgcaagcgttcgaa

SEQ ID NO: 896 - protein, 528 aa, Ustilago maydis
  Ustilago maydis (Smut fungus)
MVNITYGVLQAPDGSSATSSAIAKGTDIIVSYGPNGESVASYSPGDISWVLTCTALVWLMIPGLGYLYSGLARRKNAPHLLLLTLAALAVVSFQWFFWGYSLTFSQTSGAFLGNLRNFGYMGVLENPVPQAYNKVPEIVYAIYQCMFANLVPAIAIGAACERGRVWPFLVFTFVWTTLVYDVIACWVWNPTGWAFKWGVLDYAGGGPVEINSGITGLVISYYLGPRTGYGTERLLFKPHNVSYIFLGTAFLWFGWIGFNGGSVFAANLRAAMAISTTNLAASSAGLTWMFLDWRLERKWSVVGFCTGAIAGLVAITPAAGFVGMPAALLVGVVSSAVSNFATVLKGPMRVDDVMDIFSVHALAGIVGTLLTGIFAQASVANNDGNTVIAGGWLDSNWIQLAYQLAYCVAVTCWCGGVTFAIMFVIDHIPYIGPFRSSEMGEVVGMDEDQCGEWAYDYAFINRDLEGNYKPDHGQTLDINEKMPNVHQTDSLRSETHADSSQDNPNSQLAAAEHQSPSTAEPAVEMKQA

SEQ ID NO: 897 - DNA, 1557 bp, Sulfolobus tokodaii
  CDS (1)..(1557)
atggaaattcaaaaaacctttccccaaaataatcttataaagttattaataatactaattagtttttcaatcattctattatcattacactcatttggacagacatcatcaaatactacagcagaaatacagagtttaaatcaaagtattttggctttagaaaatcatacagcagattacccatctgcagcagttcctagctggttagatacgggtagtaatgcatggatgcttacggctgcaacgtttgtaggacttcaaagtgtacctggtgtagcactatattatgctggattatccaaaaagaaatatgctgtaaattccgcattaatggtattttatgcttttgctgcagttttagttgtttggatgatagctggttataatgctggttttggtcatcctgcattacttagtattaacggttatggaattttaggttatccattaccagcatggttaggtcactatgaagctagtcaaaccgtatttggtccaactggaacaccggtagatattccaacatctacttacatattcttccaatttgtctttgccgcaataactccagtattattagctggaggagtattagagagaatgaatttcaaagcatggatgatatttgtacccttctggagtttattagtatatagcccagtagcttattggttatttgctggtggatggttaaatcaactaggagctgtagactttagcggaggatatgttatccatgtagatgccggagtcggtgcgttagctgctgcattagcaataggtcctagattagcatctgaaagaaaattagaagctcatagcttaccattagttcttgcaggagctggtttaatttggttaggatgggatggatttaacggtggtgatcccggtggtgcaacaatcgatgctgcaatagcagtattaaatacaaatattgcaacagctgttagtgcaataacttggatgttaatggatatggcattctttaagaaaccaacattagtgggtgcaacaagtggtgcaataactggacttgtagctattacgccagctgcaggatatgtaaatggttgggaagcaatgcttattggaattgcatctggaagtataccatggttatctctgtataaatttgagcctagactgaaagttgatgatacattaggagtattctctactcacggtattgcaggaatagtgggaggattgttaactggtgtgttcgcagatccaaatgtgacacaatatgtggatccaacgttaaaaggtgctttatatggtaacttatatcaactaggaatacaagctgccgctgcagcagtagtatttgtttatgattttgcaataacttttggtctgttaaagttaataggactattcataccattgcaagcaccacctgatacattagctatcggtgattatgcaatgcatggagaagtagcatattctgaactactagctactttaccagaatcgcagataaagaaagaagaaattagagaagaggcacaagaagagaaagaagatccagatgagaaaaaatctaaataa

SEQ ID NO: 898 - protein, 518 aa, Sulfolobus tokodaii
MEIQKTFPQNNLIKLLIILISFSIILLSLHSFGQTSSNTTAEIQSLNQSILALENHTADYPSAAVPSWLDTGSNAWMLTAATFVGLQSVPGVALYYAGLSKKKYAVNSALMVFYAFAAVLVVWMIAGYNAGFGHPALLSINGYGILGYPLPAWLGHYEASQTVFGPTGTPVDIPTSTYIFFQFVFAAITPVLLAGGVLERMNFKAWMIFVPFWSLLVYSPVAYWLFAGGWLNQLGAVDFSGGYVIHVDAGVGALAAALAIGPRLASERKLEAHSLPLVLAGAGLIWLGWDGFNGGDPGGATIDAAIAVLNTNIATAVSAITWMLMDMAFFKKPTLVGATSGAITGLVAITPAAGYVNGWEAMLIGIASGSIPWLSLYKFEPRLKVDDTLGVFSTHGIAGIVGGLLTGVFADPNVTQYVDPTLKGALYGNLYQLGIQAAAAAVVFVYDFAITFGLLKLIGLFIPLQAPPDTLAIGDYAMHGEVAYSELLATLPESQIKKEEIREEAQEEKEDPDEKKSK

SEQ ID NO: 899 - DNA, 1356 bp, Rhizobium loti
  Rhizobium loti (Mesorhizobium loti)
  CDS (1)..(1356)
atgaatatttcttccaccttgaagacaacgggacgggcggccctgctgggctcgcttgctctggcagcattgggcagcgtcgccgcctttgcgcaggaagccgctccggccgctgccgcagccgccccggctgccgctcccaccccggtgctcgacaccggcaacaccgcctggatgctgacctcgacggccctggtgctgatgatgaccattccgggcctggcgctgttctacggcggcatggtgcgcaagaagaacgtgctcgccaccatcatgcagagcttcgccatcacctgcctggtgacggtgctgtggttcatgttcggctattcgctggccttctccgacggcggcggcatgaatgcctatctcggcggcttctcgaaattcttccatcacggcatcacggtctcgacgctctggctgccgggggtctcgaacattcctgaattcgtcttctcgatgttccagatgaccttcgccatcatcacacctgccctcatcgccggcgccttcgccgagcgcatgaagttctcggcgctgctgctgttcatggcgctgtggttgatcgtggtctattgcccgatcgcacattgggtctggggtggcggcttcctcggcacggctggcgtgctcgacttcgccggcggtacggtcgtccacatcaacgccggtgtcgcgggcctggtctgcgcgctggttcttggcaagcgcgaaggctacggcaccaccaacatggcgccgcacaacctggtctattcggtgatcggcgcttcgctgctgtgggtcggctggttcggcttcaacgccggttcggaactggcggcggacggtcttgccggcgctgcgatgatgaacacgcaggtcgccaccgctgccgccgcgctcgcctggatgttcgctgaatggatcgtcgccaagaagccctcggtgctcggcatcatctcgggtgccgtcgccggcctcgtcgcggtgacgccggcttccggcttcgtcaacccgaccggcgctttcatcatcggcatcgttgccggcgtgctctgctacatctcggcggtcaaggtgaagcacatgttcggctatgacgactcgctcgatgccttcggcgtgcacggcgtcggcggcatcatcggtgcgctgctcaccggcgcgctggccgatccggcgatcaacgcgctcggcaagggcggctctgtggtcacccagctctacggcatcgtcttcaccatcctgtggacggcgatcgccaccttcgtgatcctctacatcgtcaaggcgctggtcggcctgcgtccgacgacccaggaagaggtcgaaggcctcgacatctcccagcatggcgaagtggtgccgtaa

SEQ ID NO: 900 - protein, 451 aa, Rhizobium loti
  Rhizobium loti (Mesorhizobium loti)
MNISSTLKTTGRAALLGSLALAALGSVAAFAQEAAPAAAAAAPAAAPTPVLDTGNTAWMLTSTALVLMMTIPGLALFYGGMVRKKNVLATIMQSFAITCLVTVLWFMFGYSLAFSDGGGMNAYLGGFSKFFHHGITVSTLWLPGVSNIPEFVFSMFQMTFAIITPALIAGAFAERMKFSALLLFMALWLIVVYCPIAHWVWGGGFLGTAGVLDFAGGTVVHINAGVAGLVCALVLGKREGYGTTNMAPHNLVYSVIGASLLWVGWFGFNAGSELAADGLAGAAMMNTQVATAAAALAWMFAEWIVAKKPSVLGIISGAVAGLVAVTPASGFVNPTGAFIIGIVAGVLCYISAVKVKHMFGYDDSLDAFGVHGVGGIIGALLTGALADPAINALGKGGSVVTQLYGIVFTILWTAIATFVILYIVKALVGLRPTTQEEVEGLDISQHGEVVP

SEQ ID NO: 901 - DNA, 1296 bp, Rhodospirillum rubrum
  CDS (1)..(1296)
atgatgagagccttcacgttcctccccgccgccctggtcgcccttctggcgccggccctggcctatgcccaggatgcggcccccaccctggattcgggcaataccgcctggatgctgacctcgaccgcgctggtccttctgatgaccatcccgggcctcgcgcttttctatgccggcatggtccgcaagaagaacgtgctggcgaccatgatgcagagcttcatcatcaccgcgctggtcagcgtcgtgtggatggtggccggctactcgatcgcctttggcaccggcaacgcctatttcggtgacttctcgaagttcctgctgtcggacatcagcattgacagcctgaacggcaccttccccgaaacggtgttcgtcgtcttccagatgaccttcgccatcatcaccccggccctgatcaccggcgccttcgccgaacgcatgaagttctcggcgatgctgtggttcatcggcctgtgggtgctgatcgtctacgcgccgatctgccattgggtgtggagttcctcgggcttcctgttcaacgccggcgtccttgattacgcgggcggcaccgtggttcacatcaacgccggcgtggccggtctggtctgcgccctcgtcttgcgtcgtcgcgccggcttcggcagcgagaacatggccccctataacctgtcgctggccgtgatcggcgccgccctgctgtgggtgggctggttcggcttcaacgccgggtccgccgtcgccgccgatggccgtgccggcatggccatgctggcgacccagcttggcgccgccggtgccaccttgtcgtggatcgccgccgaatggctggtgcgcggcaagcccagcgtgctgggcgcggtttcgggcgccgtcgccggtctggtcgccatcaccccggcctcgggcttcgttctgcccggtggcgccctggtcatcggcctggtggccggcgtcgtctgcttctggggcgcgacttggctgaagaagaccctgggctatgacgacagcctggacgccttcggcgtgcatggcatcggcggtctggtcggcgccctgctgaccggcgtcttcgccgcccagagcgttggtggcgaagccgccgtcggcctgctcgaaggcaatcccggtcaggtcctcacccaggcctggggctgccttgccaccatcgtgtggacggccgtcgcctcctacgtgatcttgaaggtcattgatctggccatcggcctgcgggtttcgcccgagcaggaaagcgaaggcctcgacatctcgctgcacggcgagcgcctgcagtaa

SEQ ID NO: 902 - protein, 431 aa, Rhodospirillum rubrum
MMRAFTFLPAALVALLAPALAYAQDAAPTLDSGNTAWMLTSTALVLLMTIPGLALFYAGMVRKKNVLATMMQSFIITALVSVVWMVAGYSIAFGTGNAYFGDFSKFLLSDISIDSLNGTFPETVFVVFQMTFAIITPALITGAFAERMKFSAMLWFIGLWVLIVYAPICHWVWSSSGFLFNAGVLDYAGGTVVHINAGVAGLVCALVLRRRAGFGSENMAPYNLSLAVIGAALLWVGWFGFNAGSAVAADGRAGMAMLATQLGAAGATLSWIAAEWLVRGKPSVLGAVSGAVAGLVAITPASGFVLPGGALVIGLVAGVVCFWGATWLKKTLGYDDSLDAFGVHGIGGLVGALLTGVFAAQSVGGEAAVGLLEGNPGQVLTQAWGCLATIVWTAVASYVILKVIDLAIGLRVSPEQESEGLDISLHGERLQ

SEQ ID NO: 903 - DNA, 1473 bp, Dictyostelium discoideum
  Dictyostelium discoideum (Slime mold)
  CDS (37)..(1428)
aaagaccaataataataagtaataagtaatataataatggtagcaggagaaataataaaaggtgttgcagccgaaataacaaacggttcatcatcatcagttgttcaaaaatatcttgattgtgcaaatcaagtagcaccagatccaggtaatacaacatgggttttactttcaactattttagtattaggtatgatgcctgcactcgcattctttgaagcaggtctcttaagaagtaaaaatacactttcaattatcacacaaattatgtctggtattgtagttttaactgtcatgtggcaagcatttggttattcattaacttttggcccagatcaaaaaggtattattggtaatttagatcatgcatttttaattaatgtttcatatgacgattgttcaccaaatgcaccaaatattccagcagcagcttatgcattctttatgatgatgtttgcaaatattacaccattattgatgactggtgcattcgcagaaagagttaaattcaaagcattcatcgcactcaccgttgcttgggaaattattgttttctatccagttgctcattggatttggggtggtggttggttacataaatattttggtgttttagattttgctggtggtattgttattcatacaagtgctggtgttagtgctttagttattgcattatatgttggtagaagaaaagattttgaaaaatatggtggtgaattcccaccatcaaatttaccattagcaacaattggagcagcattattatggatgggttggtttggttttaatgcaggtagtgcattagcagcaggtaatattgcaacatcagcagtagcaagcacacaaattggtggtagtttttcagctattgtttggatcatcctttctgccgccaaaggaaaaccaaatactgtatcggttatcaatggtgttattgcaggtttagcaggtatcacaccagcatctggttatatcaatagtcaatattcaattgggttgggtatttgtttaggtttagcttcttactattccgttgtattattaaaacataaacttcacatcgatgatgctttagacgttagctctgtacatggtttaactggtattattggttcattggcaattggtttctgtgctgaactctctgttaatccaaatggtgcaaatggtgctttctatggtaatccaaaattaattggtactcaattactcggtgtcgtttctgtcgctgtttgggctgccgcttggacttgggtcctcttaaagattatcgatgccactatcggtgttaaaatcgatgaatctgaagaagaattaggtctcgatctcgtcgaacatggtgaattcgcttatcataatatctcacttcaaggtaatgaaaatcattattcatctgttattaatagtcatgatttttttaaataaataaataaataaataaataaataaattaaattataataataaaaa

SEQ ID NO: 904 - protein, 463 aa, Dictyostelium discoideum
  Dictyostelium discoideum (Slime mold)
MVAGEIIKGVAAEITNGSSSSVVQKYLDCANQVAPDPGNTTWVLLSTILVLGMMPALAFFEAGLLRSKNTLSIITQIMSGIVVLTVMWQAFGYSLTFGPDQKGIIGNLDHAFLINVSYDDCSPNAPNIPAAAYAFFMMMFANITPLLMTGAFAERVKFKAFIALTVAWEIIVFYPVAHWIWGGGWLHKYFGVLDFAGGIVIHTSAGVSALVIALYVGRRKDFEKYGGEFPPSNLPLATIGAALLWMGWFGFNAGSALAAGNIATSAVASTQIGGSFSAIVWIILSAAKGKPNTVSVINGVIAGLAGITPASGYINSQYSIGLGICLGLASYYSVVLLKHKLHIDDALDVSSVHGLTGIIGSLAIGFCAELSVNPNGANGAFYGNPKLIGTQLLGVVSVAVWAAAWTWVLLKIIDATIGVKIDESEEELGLDLVEHGEFAYHNISLQGNENHYSSVINSHDFFK

SEQ ID NO: 905 - DNA, 1494 bp, Schizosaccharomyces pombe
  Schizosaccharomyces pombe (Fission yeast)
  CDS (1)..(1494)
atgtcttccactaccgatgccactcccaccccttcgggtgtcaatggcggtgattccatgaccgtcaatcttaatcaattttacaataatggtgatgttgcctggattctcacaagtaccgctttggtgtttatcatgattcccggtgtcggtttcttttactccggcttggctcgtcgtagaagtgccatttctatgctgtttttgtcaatgatgtctgtcgccattgttgcctttcagtggttcttttggggttattcgcttactttctctcacgagggtggtccatacatcggatccctcgccaatttcggtcttcgccaaacgttgggtagaccttcttccggtgcttccagtgtacccgacatcttgttttgcgtgttccaaggtatgtttgccgccattactcccgctttggctatcggtgctgccgctgatcgcggtcgcatgtttccctgtatggtcttcatgtttctctggacttccatcgtctacgacccaatcgccttttggacttggaatcctaatggttggttgaacaagttgggctcttacgatttcgctggtggctctcccgttcacatctcctccggtatggctgctttggcttattccatcgtaattggaaagcgttgtgaccatggtactaccaaatatcgcccacacaacgttccccacgtcgttcttggcaccgtatttttgtggtttggttggttcggctttaacggtggttcttccgctgctgccaacatgcgtggtgtcatggctgtcgtcgttacacatcttgctgcttctgttggtggtattgtttggtgtgttatcgattttgccaagaaccgtcactggtctgtcgtcggcttctgtgaaggtgccgtcgctggtttggtcgccattactcctggctccggtttcgttcctccatgggctgccgtcgtcattggtgctttaggcgctgtcttctgctatgctgctacttaccttaagaaaatcatccgtgtcgatgatgccttggatatctttgctgaacatggtgttggtggtatggttggcaatatccttaccgctctttttgccgctgattacattgaagctttggatggtagtggtactgcttacactggtggttggattactcaccattacattcaacttggttatcagcttgcagacactgtctcttgtgccgcatattcattcgctgtctcatgtgcactcttgtttgttatgaattacattccaggactttcacttcgtgtttcacgcgaggatgaggttctcggtttggataagattgaacttggtgaaagtgcatattattacaaagactctactgacgagcctcccccaatcactacaagtggcgttcaatacacttctccaactgttagcgattccgcatccaacgaaaaggagcaagaacacagagctcaaaatgaggctcaaaaggaagaggagtatagagctgaatctgaggctcaagctccggctatttag

SEQ ID NO: 906 - protein, 497 aa, Schizosaccharomyces pombe
  Schizosaccharomyces pombe (Fission yeast)
MSSTTDATPTPSGVNGGDSMTVNLNQFYNNGDVAWILTSTALVFIMIPGVGFFYSGLARRRSAISMLFLSMMSVAIVAFQWFFWGYSLTFSHEGGPYIGSLANFGLRQTLGRPSSGASSVPDILFCVFQGMFAAITPALAIGAAADRGRMFPCMVFMFLWTSIVYDPIAFWTWNPNGWLNKLGSYDFAGGSPVHISSGMAALAYSIVIGKRCDHGTTKYRPHNVPHVVLGTVFLWFGWFGFNGGSSAAANMRGVMAVVVTHLAASVGGIVWCVIDFAKNRHWSVVGFCEGAVAGLVAITPGSGFVPPWAAVVIGALGAVFCYAATYLKKIIRVDDALDIFAEHGVGGMVGNILTALFAADYIEALDGSGTAYTGGWITHHYIQLGYQLADTVSCAAYSFAVSCALLFVMNYIPGLSLRVSREDEVLGLDKIELGESAYYYKDSTDEPPPITTSGVQYTSPTVSDSASNEKEQEHRAQNEAQKEEEYRAESEAQAPAI

SEQ ID NO: 907 - DNA, 1797 bp, Lotus japonicus
  CDS (76)..(1581)
ccacgcgtccgcccacgcgtccgcctcttgactcttgactctcccttctctttccaagtccactaccccaaaacgatggcgctgccggagtgctcggcggcgaacctagcgcagctcatcggccccaacgcgacagacgccgccgcagtcgccggattcatctgcgaccagttcaccgccgtgggtcaacgattctccgacacagcattcgcggtggacagcacctacctcctcttctccgcctacctcgtattctcgatgcagctcggcttcgccatgctctgcgccggctccgtccgcgccaaaaacaccatgaacatcatgctcaccaacgtcctcgacgccgccgccggcggcctcttctactatctcttcggtttcgcctttgccttcggcgcaccctccaacggcttcatcggccgccacttcttcggcctcaaagacgtccccaccgtagccttcgactacagctacttcctctaccagtgggcgtttgccatcgccgccgccgggatcaccagcggctcaatcgctgaacgcacacagttcgttgcctacctcatctactcgtcgttcctcaccgggtttgtctaccccgtcgtgtctcactggttctggtccggcgacggttgggccagcgccaccaacaccgggaacttgctgtttggcaccggggtgattgattttgccgggtcgggtgtggttcacatggttggtggtgttgcgggtctttggggcgcgcttattgagggacccaggattggccggtttgaccatgccggtcgagccgtttcgcttcgcggacacagtgcttcgcttgttgtgcttggaaccttcatgctctggttcggttggtacggttttaaccccggttcgttcaccaagattctcagcgcctatgattcaggcaactattatggtcagtggagcgcaataggaaggaccgccgtaacgacaacattggctggctgcacggcggcgctgaccacccttttcgggaaaagaattatctccggccactggaacgtcaccgacgtatgcaacggcttactcggcgggttcgcagcaatcaccgccggttgctccgtcgtggagccctgggcagccatcgtgtgcggcttcgtcgccgcagtggtgcttatcgcgtgcaacatgctcgcagaaaaggtgcgttacgacgaccccttagaggcagctcagcttcacggcggttgcggcgcgtgggggatcatattcaccgcgctattcgccaaggaggagtacgtgaaccaggtttacccgggtaaaccgggtcggccatacgggttgttcatgggtggtggagggaagctgctcggagcgcacgtgatccagattttggtgattatcgggtgggtcagcgccacaatgggtcctctgttcttcattctgaataagatgaagttgcttcggatctcaacggaggatgaacttgcgggtatggatctgacccgacatggtgggtttgcatatgcatatgaggatgatgaatcgcacaagccagggattcagctacggaagattgaacctaactcttcttccactcctagtgctgagtcatgataataattagtagtaataatttcgttttgtatttttccactctttgtgttctagatatttttctttcttttcttttgtagtagtagtttgtacgggcattgtaatttgtattggtcctacacctacatttgtgtgctgtgctggattctatacagcgttgatgaaaatataaaagataggtgaattctaccgtaaaaaaaaaaaaaaaaaaaaaaa

SEQ ID NO: 908 - protein, 501 aa, Lotus japonicus
MALPECSAANLAQLIGPNATDAAAVAGFICDQFTAVGQRFSDTAFAVDSTYLLFSAYLVFSMQLGFAMLCAGSVRAKNTMNIMLTNVLDAAAGGLFYYLFGFAFAFGAPSNGFIGRHFFGLKDVPTVAFDYSYFLYQWAFAIAAAGITSGSIAERTQFVAYLIYSSFLTGFVYPVVSHWFWSGDGWASATNTGNLLFGTGVIDFAGSGVVHMVGGVAGLWGALIEGPRIGRFDHAGRAVSLRGHSASLVVLGTFMLWFGWYGFNPGSFTKILSAYDSGNYYGQWSAIGRTAVTTTLAGCTAALTTLFGKRIISGHWNVTDVCNGLLGGFAAITAGCSVVEPWAAIVCGFVAAVVLIACNMLAEKVRYDDPLEAAQLHGGCGAWGIIFTALFAKEEYVNQVYPGKPGRPYGLFMGGGGKLLGAHVIQILVIIGWVSATMGPLFFILNKMKLLRISTEDELAGMDLTRHGGFAYAYEDDESHKPGIQLRKIEPNSSSTPSAES

SEQ ID NO: 909 - DNA, 1491 bp, Arabidopsis thaliana
  Arabidopsis thaliana (Mouse-ear cress)
  CDS (1)..(1491)
atgtcaggagctattacttgctctgcggctgatctctcagccctactcggcccaaatgccacggcagcggctgactacatttgcggccagttgggttccgttaacaacaagtttaccgatgcagcctacgctatagacaacacgtacctcctcttctctgcctatcttgtctttgcgatgcagctcggcttcgctatgctttgtgctggctccgttagagctaagaacacgatgaacatcatgctcactaatgtccttgatgctgcagccggaggactcttctactacctctttggttatgcatttgcctttggtgaatcctccgatggattcattggaagacacaactttggtcttcaaaactttccgactctcacctcggattactccttcttcctctaccaatgggcgtttgcaatcgcagccgctggaatcaccagcggctccattgccgagaggactaagttcgtggcgtatttgatatactcttcttttttgaccgggtttgtttacccagttgtctctcactggttctggtctccggatggatgggctagtcccttccgttcagaagaccgtttgtttggcactggagccatcgactttgctgggtcaggtgttgttcacatggttggtggtatcgcaggattatggggtgcccttattgaaggccctcggattggtcggtttcctgatgggggtcatgctattgctctgcgaggccactctgcctcactcgtcgtcttagggaccttccttctctggtttggttggtacgggttcaaccctggttccttcaccaagatactcattccctacaattctggttccaactatggccaatggagtggaataggccgcaccgcggttacaactacactctcgggatgcacagcggctctaaccacactcttcggaaaacgtctcctatcaggccactggaacgtaactgacgtttgcaacgggttactcggagggtttgcggccataacggcaggttgctctgtggttgatccatgggcagcgatcgtatgtggcttcgtggcttccctcgtccttatcggatgcaacaagctcgcagagctcttaaaatatgacgatccacttgaggccgcacaactacacggagggtgtggtgcttggggtttgatatttgtaggactgtttgcaaaagagaagtatataaatgaggtttacggcgcgagcccaggaaggcactacgggctatttatgggcggaggagggaagctattgggagcacaactggttcaaataattgtgattgttggatgggttagtgccacaatgggaacactcttcttcatcctcaaaaagctcaatttgcttaggatctcggagcagcatgaaatgcgaggaatggatttagcaggtcatggtggttttgcttatatctaccatgataatgatgatgattccattggagtgcctggatctccagtacctcgtgcgcctaaccctccagccgtttga

SEQ ID NO: 910 - protein, 496 aa, Arabidopsis thaliana
  Arabidopsis thaliana (Mouse-ear cress)
MSGAITCSAADLSALLGPNATAAADYICGQLGSVNNKFTDAAYAIDNTYLLFSAYLVFAMQLGFAMLCAGSVRAKNTMNIMLTNVLDAAAGGLFYYLFGYAFAFGESSDGFIGRHNFGLQNFPTLTSDYSFFLYQWAFAIAAAGITSGSIAERTKFVAYLIYSSFLTGFVYPVVSHWFWSPDGWASPFRSEDRLFGTGAIDFAGSGVVHMVGGIAGLWGALIEGPRIGRFPDGGHAIALRGHSASLVVLGTFLLWFGWYGFNPGSFTKILIPYNSGSNYGQWSGIGRTAVTTTLSGCTAALTTLFGKRLLSGHWNVTDVCNGLLGGFAAITAGCSVVDPWAAIVCGFVASLVLIGCNKLAELLKYDDPLEAAQLHGGCGAWGLIFVGLFAKEKYINEVYGASPGRHYGLFMGGGGKLLGAQLVQIIVIVGWVSATMGTLFFILKKLNLLRISEQHEMRGMDLAGHGGFAYIYHDNDDDSIGVPGSPVPRAPNPPAV

SEQ ID NO: 911 - DNA, 1554 bp, Schizosaccharomyces pombe
  Schizosaccharomyces pombe (Fission yeast)
  CDS (1)..(1554)
atgcttaacgagccgaatgcgctattacgtcgcgacgcaaactccactatcgcgactgtaacagaactgtttcccaacgaatactcaaatgctgatatagcgtacgtacttttgagtacagtggtagtatttaccgtaacccccggtatagctctttattatgctgggatggttagaaagaattcggctctctcaatattgactcagtcgtttttggttacagcagtggtgtttattcaatggtatctgtttggatactctcttgcttgctcatcggggtcctctttttatggaacgttgtggcaaggagggatgaaccatctttggttagaaccatatataccagggtccacaattccagcaattgtttactttccatttggtggtctctttgctgtagcgacagctcaattgtttgccggggcaatggctgagcgcggtaggctaattccctctctcgtaatatcttttttatacattacgctggtttattgtccacaggcatactggacatgggcacccaatggctggctctacacattgggtgcccttgactttgcaggcggcggtcccgtacatatttcatctggttttgctgcgctcgcttattccttatgtttaggtcgtcgcattgttgtcgacgagccagacagacccgattcaattcggtcgaccgataatgcagatttaccgtcgtcttcccaaaacaactgcaaagctaattggaagcggtggtttgggttcaaatctgtttcctggaagaattccttcggcagaggaaagatagctcataatcctccgcatgatgctggtatggtttacattggcgttgttttgatttggtttgcatggctctgcttcaattctggtactctattgactgttaatattcgtacagcttatatcatgaccaacacgctcatttcctcgtcatttggtgctttgacatgggcgattattgattacatccgttatagaaagttttccactataggtatttgcgaaggtgccattgcagggttagtgggtatcacaccagcctgtggatttgtatttccatggggagccgctgctgggggtatcgtaccggcattggtatgtaactttcttcatgacctcaatgaatggattggcgttgatgaaacgcttcgtgtctttaacttacacggtatcggcggcattgttggctccatcgtgctcggtgtagtagcgcatcccgatgtcgctgcctcagatggcgctacagttatagacgggggctgggccgttcatcactggaaacaaatgggttatcaatttgcaggttttacctctgttgctgcatggtctttcgtcataacagctatcatatgtctgttagtagatctagtaccgggccttcatattcgtgcatcttttgaagaagagttacgaggaatggattttgttgagttagaagagcaacttccaggccaaactttagagtcaaaacctatgattatatacgctcaggaaatggacgaacctgtaactcagggttcaaatataaaacaggaaaagcaggatgagttttga

SEQ ID NO: 912 - protein, 517 aa, Schizosaccharomyces pombe
  Schizosaccharomyces pombe (Fission yeast)
MLNEPNALLRRDANSTIATVTELFPNEYSNADIAYVLLSTVVVFTVTPGIALYYAGMVRKNSALSILTQSFLVTAVVFIQWYLFGYSLACSSGSSFYGTLWQGGMNHLWLEPYIPGSTIPAIVYFPFGGLFAVATAQLFAGAMAERGRLIPSLVISFLYITLVYCPQAYWTWAPNGWLYTLGALDFAGGGPVHISSGFAALAYSLCLGRRIVVDEPDRPDSIRSTDNADLPSSSQNNCKANWKRWFGFKSVSWKNSFGRGKIAHNPPHDAGMVYIGVVLIWFAWLCFNSGTLLTVNIRTAYIMTNTLISSSFGALTWAIIDYIRYRKFSTIGICEGAIAGLVGITPACGFVFPWGAAAGGIVPALVCNFLHDLNEWIGVDETLRVFNLHGIGGIVGSIVLGVVAHPDVAASDGATVIDGGWAVHHWKQMGYQFAGFTSVAAWSFVITAIICLLVDLVPGLHIRASFEEELRGMDFVELEEQLPGQTLESKPMIIYAQEMDEPVTQGSNIKQEKQDEF

SEQ ID NO: 913 - DNA, 1476 bp, Xanthomonas axonopodis
  Xanthomonas axonopodis (pv. citri)
  CDS (1)..(1476)
atgcgctctgaccccaccagccccggagttcgtatgaagacagctctttttgccgggtggaaagcccggttctacagcgtgtgcatgctgatgctgttcagcgcgctgatggtgggcggcatgggcagtgcgcatgcgcagtccacgccgcaggtcaccccgctgccgaccgagccggtcaccaccgaaccgctgccgtcggcgcagccggccgccccgccggccgccgccgccgaagccgcaccggtcgtggagaagggcgatgtcgcctggatgctgacctccaccttgctggtgttgctgatggtggtgccgggccttgcgctgttctacggcggcatggtgcgcgccaagaacgtgttgtcggtgctgatccaggtggcggtggtgttctcgctgctgaccgtgctgtgggtgttctacggctacagcctggcgttctccggcgaaggcgcgtggatcggcaatctggacaaggcgttgctcaagggcgtcaccatcgaaaccctggcggcgaccttcaccaagggcgtgagcctgccggaatacgtgttcgtggcgttccaggcgaccttcgccggcatcaccggcgcgctgatcgtgggcgcctttgccgaacgcgccaagttcgcggcggtgctgctgttctcggcgatctggttcaccttcggctacctgccgctggcgcacatggtctgggccaccggtgggtatctgttcgggttgggcgcgttggatttcgccggcggcaccgtggtgcatatcaacgccggcgttgccggcctggtcggcgcctacttcgtcggcaagcgtgccggactgggacgtgaggcgatcaagccgcacaacgtgaccctgaccttcgtcggtgcctcgctgctgtgggtgggctggttcggcttcaacgccggttccaacctggaagccaatgccggtgcggcgctggccttcctcaacaccttgctggccactgccgctgccatcctgggctggtcgctgaccgagaagatcatcaagggcaagtcgtccgccctgggcgtggcctcgggcatggtggccggcctggtcggcatcaccccggcctgcggcacggtcggcccgttcggcgcgatcgtcattggtctggcggccggcgtactgtgcgtgtggggcgtcaccggcctgaagcgcctgttgggcgcggacgacagcctggacgtgttcggcgtgcatggcctgggcggcatcatcggcgccatcctgaccggtgtgttctcggcggcctcgctgggcggccagaagggcggcgattacgacatcgtccaccaggtcggcatccaggcgctgggcgtcgggatcacggtcggctggatcggcgtggtgtcggtggtggggttcgtggttgccaagctggtgttcggcctgcgcgtgagcgaagaagccgagcgcgagggcctggacatcacctcgcacggcgaagccgcgtacgagtcgtga

SEQ ID NO: 914 - protein, 491 aa, Xanthomonas axonopodis
  Xanthomonas axonopodis (pv. citri)
MRSDPTSPGVRMKTALFAGWKARFYSVCMLMLFSALMVGGMGSAHAQSTPQVTPLPTEPVTTEPLPSAQPAAPPAAAAEAAPVVEKGDVAWMLTSTLLVLLMVVPGLALFYGGMVRAKNVLSVLIQVAVVFSLLTVLWVFYGYSLAFSGEGAWIGNLDKALLKGVTIETLAATFTKGVSLPEYVFVAFQATFAGITGALIVGAFAERAKFAAVLLFSAIWFTFGYLPLAHMVWATGGYLFGLGALDFAGGTVVHINAGVAGLVGAYFVGKRAGLGREAIKPHNVTLTFVGASLLWVGWFGFNAGSNLEANAGAALAFLNTLLATAAAILGWSLTEKIIKGKSSALGVASGMVAGLVGITPACGTVGPFGAIVIGLAAGVLCVWGVTGLKRLLGADDSLDVFGVHGLGGIIGAILTGVFSAASLGGQKGGDYDIVHQVGIQALGVGITVGWIGVVSVVGFVVAKLVFGLRVSEEAEREGLDITSHGEAAYES

SEQ ID NO: 915 - DNA, 1482 bp, Prochlorococcus sp.
  Prochlorococcus sp. (strain PCC 9511)
  CDS (1)..(1482)
atgcagactaattttttatttatgaccactgctttgcaaacgcctcaaaggcgctctaggtccaaacttcaagatgcaagtcttgtaaacggacctatgctccttttgaggagtattcgtgggttcagttcaaaccgctcaatgttgtggcttgcaactgtccctctagctttgtttggtttaggtatttttaatctttcagctcacgcagctgatttacctgagttgaatgcagcttttctagctaacaatttatggcttttgatcgctactattttagtgatcttcatgaacgccggtttcgctatggttgaagcgggtatgtgtcggtctaaaaacgccgtcaacattcttgctaaaaaccttttcgtatttgctttagctgtaacctcttattggtttattggctactcattaatgtacggaggaagtgttgctgacggatggctatattttggaggcttattttttgatccgacagtaacagccgatatggttactgatgctggattagttccaacagttgatttcttattccagtctgcttttgcaggtactgcagcaactatcgtttctggtcttgttgctgaaagagttaaatttggtgaatttgttgtttttgcgattgtattaacagcatttatttatccaattgctggtagctggaaatggaatggtggctggcttgattctcttggtttcgttgactttgcaggttcttcaattgttcactcagttggagcatgggcaggtttagtgggggctatgctcctaggaccaagaatcggtaaatactccgatggaaagccacaggctatgcctggtcacaatatggctattgctactttaggcgctttaattctatggataggttggtacggatttaatcctggttctcaacttgctatggatcaatgggttccatatgttgctgtaacgactactcttgcagctgcagctggtgctattggagcaactattgtttctactttaacttccggaaagccagatcttactatgatcattaatggtattcttgctggtttggtaagtattactgcaggttgtggtgacatgactcttgcgggagcttggttcgctggactagttggcggtattatcgttgtattctccgttgcagcacttgatgcagctgaaattgacgatcctgttggtgcattctctgttcacggagtttgtggtgtatggggtaccctagttattggtctttggggaactgcagttcaaggagatggagcaggtatgggattgttcaatggtggtggtattaatctacttcttgttcaagctcttggtgccgcggcttatgctatctggacactagttacttgctggatcgcttggtctattatcggaggtttattcggaggaatccgtgtatctgaggaagaagagactcaaggtttagatatttctgagcatggtatggaatcatatccagactttgcatctgctaaataa

SEQ ID NO: 916 - protein, 493 aa, Prochlorococcus sp.
  Prochlorococcus sp. (strain PCC 9511)
MQTNFLFMTTALQTPQRRSRSKLQDASLVNGPMLLLRSIRGFSSNRSMLWLATVPLALFGLGIFNLSAHAADLPELNAAFLANNLWLLIATILVIFMNAGFAMVEAGMCRSKNAVNILAKNLFVFALAVTSYWFIGYSLMYGGSVADGWLYFGGLFFDPTVTADMVTDAGLVPTVDFLFQSAFAGTAATIVSGLVAERVKFGEFVVFAIVLTAFIYPIAGSWKWNGGWLDSLGFVDFAGSSIVHSVGAWAGLVGAMLLGPRIGKYSDGKPQAMPGHNMAIATLGALILWIGWYGFNPGSQLAMDQWVPYVAVTTTLAAAAGAIGATIVSTLTSGKPDLTMIINGILAGLVSITAGCGDMTLAGAWFAGLVGGIIVVFSVAALDAAEIDDPVGAFSVHGVCGVWGTLVIGLWGTAVQGDGAGMGLFNGGGINLLLVQALGAAAYAIWTLVTCWIAWSIIGGLFGGIRVSEEEETQGLDISEHGMESYPDFASAK

SEQ ID NO: 917 - DNA, 1317 bp, Corynebacterium glutamicum
  Corynebacterium glutamicum (Brevibacterium flavum)
  CDS (1)..(1317)
atgggtgcagatcaaattgcagcagtctccggcaattcagcttggatgctgatgtccgcgtcgctcgtgctgctaatgacaccagcactggcacttttctatggcggcatgtctcgtcaaaagtccgtgctcaacatgatgatgatgtcctttggagcattgggcgtcgttactgttatttacctcttgtggggatggtcgatgtcttatggaacccaatcaatcgcgggaatctttgctaacccttttgagttcttcggtcttaaagattccatcgttgatgcagacggcaactacattgagggcgcagctggctacccaaacattattgatatcggattccagcttaccttcgccgttatctccactgcactgatctccggtgcgttggcagagcgtgtgaagttttccacctggcttattttcagcggcgcgtgggtgactttggtgtacttcccactggcacacatggtgtggggtggcggattgttgggccataatgtcactggttttgcttcgtggttgtttggttctaccgatggtgaagccaatatcgctccgatcgactttgctggtggtaccgttgttcacatttcggcgggcacagcggcccttgtgctggcttttatcgtcggcaagcgaaagacgtttggcaaggcaattgccaggccgcacaacctgcccatggtcatgctcggcgctgcgctgttgtggtttggttggttcgggttcaacggtggctcggcgttcgcagccgacggccttgcgggcctggcctgggtgaacaccacggcggcaaccgcagctgcgatgcttggctggttggctactgaaaaattccgcgatggacacgcaacctccttgggtgctgcttctggtgtcgtcgccggtctggtcgcaattactccagcagctggcgcactgaccccagtgacctccctgatcctcggtgcaatcggcggcatcttggcgtgcttgggcgtggggctgaagtaccgcttcggtttcgatgactccctcgacgtagttggtgtgcacctggtcgctggcctgtggggcaccgtgggtgtaggacttcttgccactgacatcggatggtttagtggtggtggcatggatggacttaaactctttattgtccagatcgtcatcgcgctagtcgctgtagttttcgcaggtgtgattactgcgctcatcgcattcgccctgaaggccacagtaggatggcgcgttgatgatgatgtggagcagcaaggcattgatactcacgaacacgcagaatccgcttatgacaccacgggtccggaaattcgttaa

SEQ ID NO: 918 - protein, 438 aa, Corynebacterium glutamicum
  Corynebacterium glutamicum (Brevibacterium flavum)
MGADQIAAVSGNSAWMLMSASLVLLMTPALALFYGGMSRQKSVLNMMMMSFGALGVVTVIYLLWGWSMSYGTQSIAGIFANPFEFFGLKDSIVDADGNYIEGAAGYPNIIDIGFQLTFAVISTALISGALAERVKFSTWLIFSGAWVTLVYFPLAHMVWGGGLLGHNVTGFASWLFGSTDGEANIAPIDFAGGTVVHISAGTAALVLAFIVGKRKTFGKAIARPHNLPMVMLGAALLWFGWFGFNGGSAFAADGLAGLAWVNTTAATAAAMLGWLATEKFRDGHATSLGAASGVVAGLVAITPAAGALTPVTSLILGAIGGILACLGVGLKYRFGFDDSLDVVGVHLVAGLWGTVGVGLLATDIGWFSGGGMDGLKLFIVQIVIALVAVVFAGVITALIAFALKATVGWRVDDDVEQQGIDTHEHAESAYDTTGPEIR

SEQ ID NO: 919 - DNA, 1690 bp, Ustilago violacea
  Ustilago violacea (Smut fungus) (Microbotryum violaceum)
  CDS (19)..(1500)
ttcgacttcagtctcatcatggtcaacgttgcgtacgatacgacagggactcttgttgccaatgtagatggcactcagaccgtgtacaatggcggtgacatggcatgggtgcttgtcgccggtgttctcgtcatgatcatgtcccccggagttggtttcctctattctggtcttttgcgtaggaagaatgctttgtctatgatgatgctcggtgtccttgtctatgcggttattacaattcaatggtttttttggggctactcgttggcttttagcagcaccggcagtgccttcatcggcgacttgaagcactttggcctcatgaacgtcacgctcgaaccatccgccgggtcctccaagattcctgctctgttgtattacttctaccaatccatgttcgccactgtgactgtggttattcttgttggaggtattgcagaacgtgcacgtattctaccgcttctcattttctgcttctgttgggccaccatcgtgtacgaccctattgccaactgggtctggaaccccaacggatggctctacaagctcggtgagctcgactttgccggcggaggacccgtccatatcacttcgggaaccgctggctttgcgtggtcgctctacttgggccgtcgtcgcggttatggtacagccaagctcgcttaccgcccccactcggtcttccaaatcatcctcggcaccgtcttcctctggttcggctggttcggatttaacggtggatccgaactggcgatgaacttgcgcgcagtccaggcctcgactgtcaccaacatcgctgccgctatgggtggaatcacctggttcgcgatggattggttctacaccaagaagtggtctgctgtctcgatgtgctccggtatcctcgctggtctcgtcggcatcacccctgcggctggttatattggctctcccgcggcgttggccattggtttcctcaccgcaattgcatgcaactttggcactggcctcaaagttctgctcggaatcgatgatgccgtcgactcgttcgcgctccacgccattgggggctactgcggatccgccttgactgcgctcttcgccgatagccgcgtcgctggatttgatggctacaccgagattcctggcggctggatcaaccacaactacatccagcttgggtggcaactcgccggagcgacgacgatcatggcttacaccttcgtcgtcacctacctgctcctctttgtcatcgaccacattcctggcctcaaactccgagctactgaggacatggagattcttggtatcgacgagaccgagctcggcgagaacgcctacgactttgtcttccgcaaccgtgatcttgagaaccctgaggaattctccgaattgcacaaccgagcaactggcgaagaccttagccgccaagtgagccatcactcgtcgtcgagccacaacaaggacatcaagtcgcctcactccgctgtccccgtgacggaggagaaattgagcgtttgagacggaatgtagagaccactgcaccgactcgccggctttgaccagcgctgtacactctcccatatccaaccactttgcctctctgtctgacctaacgtcgcctgtgcttctaccaatctcgcattcgttttcttttgggggtattctttgtgtttcctatatttaattacacatatgctctttcagccgc

SEQ ID NO: 920 - protein, 493 aa, Ustilago violacea
  Ustilago violacea (Smut fungus) (Microbotryum violaceum)
MVNVAYDTTGTLVANVDGTQTVYNGGDMAWVLVAGVLVMIMSPGVGFLYSGLLRRKNALSMMMLGVLVYAVITIQWFFWGYSLAFSSTGSAFIGDLKHFGLMNVTLEPSAGSSKIPALLYYFYQSMFATVTVVILVGGIAERARILPLLIFCFCWATIVYDPIANWVWNPNGWLYKLGELDFAGGGPVHITSGTAGFAWSLYLGRRRGYGTAKLAYRPHSVFQIILGTVFLWFGWFGFNGGSELAMNLRAVQASTVTNIAAAMGGITWFAMDWFYTKKWSAVSMCSGILAGLVGITPAAGYIGSPAALAIGFLTAIACNFGTGLKVLLGIDDAVDSFALHAIGGYCGSALTALFADSRVAGFDGYTEIPGGWINHNYIQLGWQLAGATTIMAYTFVVTYLLLFVIDHIPGLKLRATEDMEILGIDETELGENAYDFVFRNRDLENPEEFSELHNRATGEDLSRQVSHHSSSSHNKDIKSPHSAVPVTEEKLSV

SEQ ID NO: 921 - DNA, 1658 bp, Arabidopsis thaliana
  Arabidopsis thaliana (Mouse-ear cress)
  CDS (63)..(1490)
  misc_feature (548)..(548): n is a, g, c or t
cccacgcgtccgcacaaacccaacaaaaatttcatcaactccgggaaagatagaataacaaaatggccggagcttacgatccaagcttgccggaggttcctgaatggctcaacaaaggagacaacgcgtggcagctcacggcagcgactctggttggtctacagagtatgccaggtcttgttatcctctatgcctccatcgtcaagaagaaatgggctgtgaattcagcttttatggctctttacgctttcgccgccgttcttctctgttgggtcctcctctgttacaaaatggcttttggagaagagcttttgccgttttggggcaaaggtggtccagctttcaaccaaggataccttaagggacaagcaaagatcccaaatagtaatgtggcggcgccgtattttccgatggcgacgttggtgtattttcagttcacattcgcggcgataacgacgatacttgtggcgggatctgtgttggggaggatgaatattaaagcatggatggcttttgtgccattgtggttgatctttagctacacagtnggagcttatagtatatggggaggtgggtttctgtatcagtggggagttattgattattccggcggttatgttattcatctctcctccggtgttgccggtttcgtcgctgcttactgggtaggaccaaggcctaaggctgacagagagagattcccaccgaacaatgttctactaatgcttgctggagctggccttttatggatgggatggtccggttttaacggtggtgctccttacgcggccaatttaacctcctctatcgcggtgttaaacaccaacctctctgccgccacaagcctccttgtgtggacaacacttgatgtcatcttctttggcaaaccttctgtcatcggagcaattcaaggcatggttactggcttagccggcgtcactcccggagcaggtttgatccaaacatgggcagctataataattggagtagtctcaggaacagctccatgggcctctatgatgatcattcacaagaaatccgctctccttcaaaaggtggatgatacattagcggtgttttacacacacgccgtggctggtttacttggtggaataatgacagggttgtttgcacaccctgatctctgcgttttggtacttcctctcccagcgaccagaggagctttctacggtggcaatggcggcaaacagcttttgaaacagttggctggagctgccttcattgccgtctggaatgtggtgtcgactactatcattctactcgctattagggtgttcataccattgagaatggctgaggaagagctcgggattggagacgacgcagcacatggggaagaagcttatgctctttggggagatggagagaagtttgatgctacaaggcatgtgcaacagtttgagagagatcaagaagctgctcatccttcttatgttcatggtgctagaggtgtcaccattgttctatgatttttcttcttctttttcttatttatttttttgtgtattgatttccttatgacattagagatgtgaatgagttatttgtgttctgtataggtggtaaaacttcacttttcatattttttggtgtgtatttggagttaacaaccaaaaaaaaaaaaaaaaaaaaaaaaa

SEQ ID NO: 922 - protein, 475 aa, Arabidopsis thaliana
  Arabidopsis thaliana (Mouse-ear cress)
MAGAYDPSLPEVPEWLNKGDNAWQLTAATLVGLQSMPGLVILYASIVKKKWAVNSAFMALYAFAAVLLCWVLLCYKMAFGEELLPFWGKGGPAFNQGYLKGQAKIPNSNVAAPYFPMATLVYFQFTFAAITTILVAGSVLGRMNIKAWMAFVPLWLIFSYTVGAYSIWGGGFLYQWGVIDYSGGYVIHLSSGVAGFVAAYWVGPRPKADRERFPPNNVLLMLAGAGLLWMGWSGFNGGAPYAANLTSSIAVLNTNLSAATSLLVWTTLDVIFFGKPSVIGAIQGMVTGLAGVTPGAGLIQTWAAIIIGVVSGTAPWASMMIIHKKSALLQKVDDTLAVFYTHAVAGLLGGIMTGLFAHPDLCVLVLPLPATRGAFYGGNGGKQLLKQLAGAAFIAVWNVVSTTIILLAIRVFIPLRMAEEELGIGDDAAHGEEAYALWGDGEKFDATRHVQQFERDQEAAHPSYVHGARGVTIVL

SEQ ID NO: 923 - DNA, 1359 bp, Corynebacterium glutamicum
  Corynebacterium glutamicum (Brevibacterium flavum)
  CDS (1)..(1359)
atggacccctcagatctagcctggattctcgcagcttttgcgttggtaagcctgatgttccccggattgtccctgctctacggcggcatgctgggtgggcaacacgttcttaacacgttcatgatggttatgagctcacttggaatcatcagccttgtgtacatcatttatggacacggacttgtcttaggaaactccatcggtgggtggggaattatcggaaatccccttgaatacttcggcttccgcaacattatggaagatgacggcaccggagacctcatgtgggccggcttctacattctgttcgctgcaatctcactcgcacttgtttcatctggtgcagcggggcgcatgcgctttggagcgtggctggtcttcggtgtcctgtggttcacctttgtgtacgcgccactggcacactgggttttcgctatcgatgatcctgagtccggctacgtgggtggctggatgaaaaatgtgcttgagttccacgactttgctggtggaacggcagtgcacatgaatgcgggtgcgtctggactcgcgctggcaatagtgctgggacgccgccactccatggctgtgcgtccacacaaccttccactgattttgattggtgcaggactgatcgttgcgggctggttcggattcaatggtggtaccgcaggtggtgccaacttcctcgcaagctacgtggtcgttacctctctcattgctgcagctggcggaatgatgggcttcatgctcgttgaacgtgtgttcagcggaaaacccactttctttggctcggcaaccggcacaatcgcaggccttgtggctatcaccccggccgcggatgcagtgagcccgctcggagcattcgccgtcggagcgctcggcgcagttgtctccttctgggcaattagctggaagaagggacaccgagtcgatgattccttcgatgtgttcgcagtccacggaatggccggcattgcaggtgcactgtttgtcatgctctttggcgatccactagcaccagcgggagtttccggagtcttcttcggtggcgaactctccctgctgtggagggaaccactggccatcatcgtgacccttacatacgcattcggcgtgacctggttgattgccacgatcttgaacaagttcatgactctgcgcatcacctccgaagccgaatatgaaggcattgaccgcgcagaacacgcagaatctgcctaccacctcaattccaacggaattgggatggcaacccgcaccaatttcggacctgaaatccccgaggaaaccgtgcccgacgccgtgcaggtgggcgtcgataagcaaaaaatcgctgatactcgaaaggcctcaaaatga

SEQ ID NO: 924 - protein, 452 aa, Corynebacterium glutamicum
  Corynebacterium glutamicum (Brevibacterium flavum)
MDPSDLAWILAAFALVSLMFPGLSLLYGGMLGGQHVLNTFMMVMSSLGIISLVYIIYGHGLVLGNSIGGWGIIGNPLEYFGFRNIMEDDGTGDLMWAGFYILFAAISLALVSSGAAGRMRFGAWLVFGVLWFTFVYAPLAHWVFAIDDPESGYVGGWMKNVLEFHDFAGGTAVHMNAGASGLALAIVLGRRHSMAVRPHNLPLILIGAGLIVAGWFGFNGGTAGGANFLASYVVVTSLIAAAGGMMGFMLVERVFSGKPTFFGSATGTIAGLVAITPAADAVSPLGAFAVGALGAVVSFWAISWKKGHRVDDSFDVFAVHGMAGIAGALFVMLFGDPLAPAGVSGVFFGGELSLLWREPLAIIVTLTYAFGVTWLIATILNKFMTLRITSEAEYEGIDRAEHAESAYHLNSNGIGMATRTNFGPEIPEETVPDAVQVGVDKQKIADTRKASK

SEQ ID NO: 925 - DNA, 1751 bp, Lycopersicon esculentum
  Lycopersicon esculentum (Tomato)
  CDS (56)..(1522)
tccccttcatcttcttcgcacccacccacccctctaccccacccccaccccaccaatggcttgttccgtcgatactctcgctccgttcctcggtcctaacaccaccaacgccgtcgccgccgcttcatacatctgcaaccaattttcaggtgtatcggacagattcgtcgataccggttatgcaatcgattctacatatctcctcttctctgcttatctcgttttctccatgcagcttggtttcgctatgcttttggcgggctctgtgcgaaatacaatgaatattatgctcacgaacgtcctcgatgccgccgccggtggacttttttactatctattcggattcgcttttgctttgggtggtccgtctaatggattcatcggccgacattttttcgggcttaaagagatcccgtcaaattcattcgattacatgaatttcctctatcaatgggctttcgccatcgccgccgccggtatcaccagcggttcaatcgccgaacgaacccaatttgttgcctatttgatttattcctcttttctaacgggtttcgtttacccggttgtttctcattggttttggaccccagatgggtgggctagcccgactaattcaaatctattattcggatccggtgtaatcgatttcgccgggtcgggtgtagttcatatggtaggtggaatcgccgggttttacggagctttgattgaaggtccacgaatcgggcggtacgatcatacgggtcgatcggttgcgcttcgtggacatagcgcgtcactcgtggttctaggcacctttttattatggttcggatggtacggatttaaccccggttcatttaataaaatcctagttacttacggtgcatccggagggtattatggtcaatggagcgctgtaggacgtaccgcggttacaactaccctagccggttgcaccgcagccctaacgactcttttcggtaaacgtatcctttcgggtcattggaacgtaaccgatgtatgtaacggtttactaggcggatttgcagcgatcacggctgggtgctcggtcgtcgagccgtgggccgcgattatatgtgggttcgtagcggctttagttttaattggttttaacatgttagcggaaaaatttaaatacgacgatccacttgaagcagcacaattacatgggggttgtggtgcatgggggataatttttaccgggttattcgctaaaggggagtttgtggatcaagtatacccgggtaaaccgggtcgacctcacgggttatttatgggtggtggagggaaactactcggggcgcatataatccagatactcgtaataatcgggtgggtcagcgcgacaatgggtccgcttttttatatacttcataaattcaagttgcttcggatatcgtccgaagacgaaatggcgggtatggatctgacccgacatggtgggtttgcttattatcatgaagaggatccgaaattaggaatgcaaatgagaagaattgaaccaacaacctcaacttagaaaaaaaaataaaaaaaaaaattatctttttatttatgtatctttgaattgtctagtttatatttttataaaattaatattagggtgtttgtgaaaagaaaaaaaaaatagtggatttttttaatggtaaaaatgagtggttgtgtatgaagataatgtgaacatgtcctcttttattattttctactagttatcctatatttgactattaatatccaaaaaaaaaaaa

SEQ ID NO: 926 - protein, 488 aa, Lycopersicon esculentum
  Lycopersicon esculentum (Tomato)
MACSVDTLAPFLGPNTTNAVAAASYICNQFSGVSDRFVDTGYAIDSTYLLFSAYLVFSMQLGFAMLLAGSVRNTMNIMLTNVLDAAAGGLFYYLFGFAFALGGPSNGFIGRHFFGLKEIPSNSFDYMNFLYQWAFAIAAAGITSGSIAERTQFVAYLIYSSFLTGFVYPVVSHWFWTPDGWASPTNSNLLFGSGVIDFAGSGVVHMVGGIAGFYGALIEGPRIGRYDHTGRSVALRGHSASLVVLGTFLLWFGWYGFNPGSFNKILVTYGASGGYYGQWSAVGRTAVTTTLAGCTAALTTLFGKRILSGHWNVTDVCNGLLGGFAAITAGCSVVEPWAAIICGFVAALVLIGFNMLAEKFKYDDPLEAAQLHGGCGAWGIIFTGLFAKGEFVDQVYPGKPGRPHGLFMGGGGKLLGAHIIQILVIIGWVSATMGPLFYILHKFKLLRISSEDEMAGMDLTRHGGFAYYHEEDPKLGMQMRRIEPTTST

SEQ ID NO: 927 - DNA, 1671 bp, Arabidopsis thaliana
  Arabidopsis thaliana (Mouse-ear cress)
  CDS (10)..(1569)
ggctcaaacatgtcaggagctataacatgctctgcggccgatctcgccaccctacttggccccaacgccacggcggcggccgactacatttgcggccaattaggcaccgttaacaacaagttcaccgatgcagccttcgccatagacaacacctacctcctcttctctgcctaccttgtcttcgccatgcagctcggcttcgctatgctttgtgctggttctgttagagccaagaatacgatgaacatcatgcttaccaatgtccttgacgctgcagccggaggactcttctactatctctttggttacgcctttgcctttggaggatcctccgaagggttcattggaagacacaactttgctcttagagactttccgactcccacagctgattactctttcttcctctaccaatgggcgttcgcaatcgcggccgctggaatcacaagtggttcgatcgcagagaggactcagttcgtggcttacttgatatactcttctttcttaaccggatttgtttacccggttgtctctcactggttttggtccccggatggatgggccagtccctttcgttcagcggatgatcgtttgtttagcaccggagccattgactttgctggctccggtgttgttcacatggttggtggcatagcaggtttatggggtgctcttattgaaggtcctcgtcgtggtcggttcgagaaaggtggtcgcgctattgctctgcgcggccactctgcctcgctagtagtcttaggaaccttcctcctatggtttggatggtatggtttcaaccccggttccttcactaagatactcgttccgtataattctggttccaactacggccaatggagcggaatcggccgtacagcggttaacaccacactctcaggatgcacagcagctctaaccacactctttggtaaacgtctcctatcaggccactggaacgtaacggacgtttgcaacgggttactcggtgggtttgcggccataaccgcaggttgctccgtcgtagagccatgggcagcgattgtgtgcggcttcatggcttctgtcgtccttatcggatgcaacaagctcgcggagcttgtacaatatgatgatccactcgaggcagcccaactacatggagggtgtggcgcgtgggggttgatattcgtaggattgtttgccaaagagaagtatctaaacgaggtttatggcgccaccccgggaaggccatatggactatttatgggcggaggagggaagctgttgggagcacaattggttcaaatacttgtgattgtaggatgggttagtgccacaatgggaacactcttcttcatcctcaaaaggctcaatctgcttaggatctcggagcagcatgaaatgcaagggatggatatgacacgtcacggtggctttgcttatatctaccatgataatgatgatgagtctcatagagtggatcctggatctcctttccctcgatcagckctcctcctcgcgtttaattttcaactttttggtaatttattaccgtttaagtattgtttgggctttggttttgaaatataaatatttggatgttttggtttgttttaagtgacctatcgtctttttgtgtttataagtgttttagtttatgttttttttttttaaaaaaaaaaaaaaaaaaaa

SEQ ID NO: 928 - protein, 519 aa, Arabidopsis thaliana
  Arabidopsis thaliana (Mouse-ear cress)
MSGAITCSAADLATLLGPNATAAADYICGQLGTVNNKFTDAAFAIDNTYLLFSAYLVFAMQLGFAMLCAGSVRAKNTMNIMLTNVLDAAAGGLFYYLFGYAFAFGGSSEGFIGRHNFALRDFPTPTADYSFFLYQWAFAIAAAGITSGSIAERTQFVAYLIYSSFLTGFVYPVVSHWFWSPDGWASPFRSADDRLFSTGAIDFAGSGVVHMVGGIAGLWGALIEGPRRGRFEKGGRAIALRGHSASLVVLGTFLLWFGWYGFNPGSFTKILVPYNSGSNYGQWSGIGRTAVNTTLSGCTAALTTLFGKRLLSGHWNVTDVCNGLLGGFAAITAGCSVVEPWAAIVCGFMASVVLIGCNKLAELVQYDDPLEAAQLHGGCGAWGLIFVGLFAKEKYLNEVYGATPGRPYGLFMGGGGKLLGAQLVQILVIVGWVSATMGTLFFILKRLNLLRISEQHEMQGMDMTRHGGFAYIYHDNDDESHRVDPGSPFPRSALLLAFNFQLFGNLLPFKYCLGFGFEI

SEQ ID NO: 929 - DNA, 1659 bp, Lycopersicon esculentum
  Lycopersicon esculentum (Tomato)
  CDS (179)..(1561)
aaaggattcaatatctactcgtacaaaaaaaaagatgaaaaactttaatctatgtataaacccctggatactacctgactcagttatcaaataagtttcgtggaccattccagttcacctgttttttaaataaatatcctattatgtgaatgttgtgtgaagcaagcaaatagcaataatggattcttcatgggaagctagtgtaactgattccataaatgcaatttaccttttattctctgcttacttggtttttgtaatgcaattgggttttgccatgctttgtgctggttctgttagggcaaagaatgcaatgaacattatgcttacaaatgtagttgatgctgttgttggtagtctttcatactatctttttggttttgcttttgcttttggcgattcaaatccatttataggtgctagttattttgctcttaaagacattccttctagctcttatgactacagtttctttctttatcaatgggcttttgctattgctgttgctggaattactagtggttctattgctgaacgtactcaatttactgcttatcttgtcttctcttttttccttactggatttgtttatcctgttgttgctcattggctttggtcttctaatggttggttaagtccaaattcaacttatcttctttttggttctggtgctattgactttgccggtagtggtgttgtgcatttggttggtgggattgctggtttttggggttctattgtagaaggtccaagagttggacggtttgatgcctttggtaatcctgtcaaaatgagaggacataatgctactctagtagtgcttggaacattgttgttgtggtttggatggttcgggtttaatcctggatcattcaacaaaattcttgttgcctacccacatatggctgatcaaggtaactggacctctgtgggacggactgctgtcacgactaccctggctggttcaaccgcggggattgttaccttgtttggacgaaggttattggtgggacattgggatgcaatggatgtttgtaatggagttcttggtgggtttgttgcaatcacttcaggttgttcagtggtagaaccatgggctgcaattttgtgtgggttctgtgcagcttgggtactgataggattgaacattttagcgcttaaattcaaattcgatgatccgttagaagcagcacagttacatggagggtgtggagcttggggtttgatatttacagggttgtttgctaaagaagaatttgtgttacaagcttataattccggtaaaacacaaattatacgaccttccggcctgattttaggaggtggatggggtttgtttggggcacaaatagttgaactattgagtattgtggtttgggtaagtttgacaatgggacctttgttttatctacttcagaaacttggaattttgaggatatcatcggacgaggaggttgctggtcttgatatctctagtcacggaggttatgcctacgatgctagtcaagaagaaagtaatgctcgcttctatggcgagtatttaaggatgcaacaacaataataaggtgcacacctcaactattctaccgtatacaagattgctttcatcaaatgtaaatatatgcaactttgtaatttcctcaaaaaaaaaaaaaaaaa

SEQ ID NO: 930 - protein, 460 aa, Lycopersicon esculentum
  Lycopersicon esculentum (Tomato)
MDSSWEASVTDSINAIYLLFSAYLVFVMQLGFAMLCAGSVRAKNAMNIMLTNVVDAVVGSLSYYLFGFAFAFGDSNPFIGASYFALKDIPSSSYDYSFFLYQWAFAIAVAGITSGSIAERTQFTAYLVFSFFLTGFVYPVVAHWLWSSNGWLSPNSTYLLFGSGAIDFAGSGVVHLVGGIAGFWGSIVEGPRVGRFDAFGNPVKMRGHNATLVVLGTLLLWFGWFGFNPGSFNKILVAYPHMADQGNWTSVGRTAVTTTLAGSTAGIVTLFGRRLLVGHWDAMDVCNGVLGGFVAITSGCSVVEPWAAILCGFCAAWVLIGLNILALKFKFDDPLEAAQLHGGCGAWGLIFTGLFAKEEFVLQAYNSGKTQIIRPSGLILGGGWGLFGAQIVELLSIVVWVSLTMGPLFYLLQKLGILRISSDEEVAGLDISSHGGYAYDASQEESNARFYGEYLRMQQQ

SEQ ID NO: 931 - DNA, 1603 bp, Ustilago maydis
  Ustilago maydis (Smut fungus)
  CDS (91)..(1554)
cagctcccctgttcctgagcaagcttgtacaacagcttcgccattcccacttttccctttccagagcggcatcgctgatctctcccaaaaatggttaacgccagctacacgcccagcggcgatctgatcacctactacgatgaccaaggcacgcccaccgaactcatctataacctcggcaacatgtcgtggatcattgtttcgaccgccttggtctttatcatgattcccggtcttggtttcttctacgccggtctgctcagaaagaagtcggcgctctctatgatctggatgtccatggtgattttgtcggtcgcatccttcgagtggttcttctggggcttttctctcgctttctccaccagctctagcaacaagttcattggtaaccttgacaactttggtctgatcaacgtcgacattgggccttctacaggagggaccgggcttccacagctgctcttctgcatctaccagatgatgttcgccgccatcacccctgtgattgcctgcggtgcgtttgccgaccgtgctcgattgggtcccgttctcattttcgccttctgctggtgcactattgtctacaatcccatcgcctattggacatggaacgtcggcaagggttgggccaacgtcatgggtggtctcgacttcgccggtggtacacctgttcacatctcttcgggtaccgctgcgctcgccatctcgatcttcctcggcaagcgtaaggggtacggcacggagcagttggcctaccgaccccacaacgttgcctacgtcatcttgggaaccgtgctgctgtggtttggctggttcggcttcaacggtggttcggctcttggtgccaaccttcgtgctgttcaggccatgatggtcactcaggtggctacctcggtcggtggtctcacctggatgttctgggactggaggctggagcgcaagtggtcggctgtcggtttctgctctggtgccatctcgggtctggtcgctatcacgccagcttctggttacgtcggaacgcccgcagctgttgcctttggcgtgctcggtggtacggcttgcaactttgccactggtctcaagaaccttttcggttacgatgatgctctcgacatctttgctgctcacggtattggtggtattgtgggcaacttgcttactggtatctttgccgacaaccgcgttgcgtcgtttgacggtaccgctccgatccctggtggttggatcaacaagaactggattcagcttggttatcagcttgccgactcggctgccggtttcggttggtcgtttgtggttacgctcatcctgctgttcgccatcgaccgcatccctggctgccacttccgatctagcgaggaggacgagtctctgggtatcgatctcactcagatcggagaagaggtcatggtgatgcctctgcttcacgactttgttcgcccagaggacggcgcagagattcatcacgctactgcatccaccgatctcaagttctcgcctgctcacagcgagaaggacctcgaggctgctcgtccacagcctactgctgtctaagcttgactcctgcccccctccccgctattcttggcccctatctttgggc

SEQ ID NO: 932 - protein, 487 aa, Ustilago maydis
  Ustilago maydis (Smut fungus)
MVNASYTPSGDLITYYDDQGTPTELIYNLGNMSWIIVSTALVFIMIPGLGFFYAGLLRKKSALSMIWMSMVILSVASFEWFFWGFSLAFSTSSSNKFIGNLDNFGLINVDIGPSTGGTGLPQLLFCIYQMMFAAITPVIACGAFADRARLGPVLIFAFCWCTIVYNPIAYWTWNVGKGWANVMGGLDFAGGTPVHISSGTAALAISIFLGKRKGYGTEQLAYRPHNVAYVILGTVLLWFGWFGFNGGSALGANLRAVQAMMVTQVATSVGGLTWMFWDWRLERKWSAVGFCSGAISGLVAITPASGYVGTPAAVAFGVLGGTACNFATGLKNLFGYDDALDIFAAHGIGGIVGNLLTGIFADNRVASFDGTAPIPGGWINKNWIQLGYQLADSAAGFGWSFVVTLILLFAIDRIPGCHFRSSEEDESLGIDLTQIGEEVMVMPLLHDFVRPEDGAEIHHATASTDLKFSPAHSEKDLEAARPQPTAV

SEQ ID NO: 933 - DNA, 1470 bp, Geobacter sulfurreducens
  CDS (1)..(1470)
atgaagtggaaacgttcgatcatcacacttgccctggccgccgcagccttcatggctccggccgcagtcctcgccgaagaggccaaggcccccgccgtggcggcaacccaggcagccgtcacctccgcccaggctgctccggcggccgttgccccggctgaggccgcaccggcggctgccgaagcccccaaggtggccgaaccggtcctcaataccggcaataccgcctggatgctcgtctgcgcggccctggtccttctgatgcttcccggccttgccctcttttacggcggcatggtccggagcaaaaacgtcctctcaaccctgatgcattcctttgttgccatggggatcgtgggggtccagtgggccgtcatcggttactcgctggccttcggtcccgacatgggcggcatggggcttgtgggagacttcagccgggcgctgctcaacggaatgatcagcttcaaggacggcgcgccggtctacaccctctggcagaacgtgaccagtgaacccaacgccatccccgagtacgtctttgccatgttccagggaatgttcgccatgatcaccgtagccctcatctccggcgccatggccgagcgggttaagttctccgcctactgcgtctttgtgctcctttggaccaccctggtctacgatcccctggcccactgggtctggatggtggacggctggctcttcaagaagggtgccctggactttgccggcggcaccgttgttcacctctcctccggtatttccgccctggcgttcctcgtcttcctcggcaaacgtcacgggttcccccatgagcgtatggctccccataacctctccatgaccatgctcggcgtggggctcctctggttcggctggttcgggttcaacgcgggttcggcggtagtcggcgtgaacaacgttgatgcggccggcgggcttgcgggcctcgccttcgccaccaccaccatcgccccggcagccggcggcctggcctggatgatcgccgaatggatccacgcgggcaggccctcggcactcggcttcggttcaggcgtggtcgcaggactggtcggcattacgcccgcggccggctttgtccagccgggcgctgccatcatcatcggcctcggcgccggcgtgatctgctacctgggtgtgctcatgaaggcgaagctcaagtatgacgactccctggatgccttcggcgtgcacggcgtgggcggcacctttggcgccctcgtcaccggcgtcttcgccacggtgggggccacggggctcctctccggcaacgtgtcccagttcatcacccaggtgatcggggtggtgtcggccggtgcctatgccttcatcgtgaccctggtcatcgccttcatcctcgacaagaccatcggtctccgggtggagaaggaagacgagatcatgggcctcgaccagacccagcactccgagtcggcgtacaactag

SEQ ID NO: 934 - protein, 489 aa, Geobacter sulfurreducens
MKWKRSIITLALAAAAFMAPAAVLAEEAKAPAVAATQAAVTSAQAAPAAVAPAEAAPAAAEAPKVAEPVLNTGNTAWMLVCAALVLLMLPGLALFYGGMVRSKNVLSTLMHSFVAMGIVGVQWAVIGYSLAFGPDMGGMGLVGDFSRALLNGMISFKDGAPVYTLWQNVTSEPNAIPEYVFAMFQGMFAMITVALISGAMAERVKFSAYCVFVLLWTTLVYDPLAHWVWMVDGWLFKKGALDFAGGTVVHLSSGISALAFLVFLGKRHGFPHERMAPHNLSMTMLGVGLLWFGWFGFNAGSAVVGVNNVDAAGGLAGLAFATTTIAPAAGGLAWMIAEWIHAGRPSALGFGSGVVAGLVGITPAAGFVQPGAAIIIGLGAGVICYLGVLMKAKLKYDDSLDAFGVHGVGGTFGALVTGVFATVGATGLLSGNVSQFITQVIGVVSAGAYAFIVTLVIAFILDKTIGLRVEKEDEIMGLDQTQHSESAYN

SEQ ID NO: 935 - DNA, 1221 bp, Geobacter sulfurreducens
  CDS (1)..(1221)
atggactctctgtcaatggtgacaggtctcaggaacagtgccgacgtgctgtttctcatgctgggtgcggtcatggtctttgccatgcacgcaggcttcgcattcctggaagtgggcaccgtccgcaagaaaaaccaggtcaatgcctttgtaaagatcctcaccgactggtccgtttcaaccgtggcctattttctggtgggattccccatttcctacggaatatcctttctcgtacctgccggcgaccttcttggcaccacccagggatacgacctagtccgctactttttcctgctctgtttcgcagcatgcatcccggcgatcatctcgggcggaatcgcggagcgggccaagttctggccccaggttttggcgggtgccatctttgccggcgtctcctaccccctgttcgaatccctgatctggggccagaacgcctcgctgctccaaggctttttcaaaagcgtgggcggagctgaattccacgacttcgccggttcggttgtcgtccactccgtcggaggctggctggctctgccggccgtgctggtactgggtccccgcatggggcgctacgtgcgcggcaagtcgcatcccatccccatcagcaacataccgttcctggcgctcggctcctggattctcgccgtggggtggttcggcttcaatgtcatgagcgcggggcatgtggaaaaaatctcggggctggtggcggtcaactcgctcctggcaatggtcggcggcgtactcgcagccattgttgccgggcggaatgaccccggcttcgttcacaacggcgccttggccggcctcatcgccatctgtgctggcagcgacatcatgcacccccttgcagccttcgccaccggtgccgttgcctccgtcatcttcgtctacggcttccagtacgagcaggaacggctcaagatcgacgacgtacttggtgtctggcccctccacggtgtcatcggcacctggggcggcattgctgcggggatattcggtcagccgctgttcggaggcatgggtggcgtctccttcgtttcccaattcctgggaagcctcgcggccgtggtcttcgcacttgttaacggtttcctggtctatggcattctctcccgcaccgtgggcatccggctaaccgatgaacaggagtttgccggcgccgacctttcgatccaccagattggcgcctatcccgaagaccatgtgcgctaa

SEQ ID NO: 936 - protein, 406 aa, Geobacter sulfurreducens
MDSLSMVTGLRNSADVLFLMLGAVMVFAMHAGFAFLEVGTVRKKNQVNAFVKILTDWSVSTVAYFLVGFPISYGISFLVPAGDLLGTTQGYDLVRYFFLLCFAACIPAIISGGIAERAKFWPQVLAGAIFAGVSYPLFESLIWGQNASLLQGFFKSVGGAEFHDFAGSVVVHSVGGWLALPAVLVLGPRMGRYVRGKSHPIPISNIPFLALGSWILAVGWFGFNVMSAGHVEKISGLVAVNSLLAMVGGVLAAIVAGRNDPGFVHNGALAGLIAICAGSDIMHPLAAFATGAVASVIFVYGFQYEQERLKIDDVLGVWPLHGVIGTWGGIAAGIFGQPLFGGMGGVSFVSQFLGSLAAVVFALVNGFLVYGILSRTVGIRLTDEQEFAGADLSIHQIGAYPEDHVR

SEQ ID NO: 937 - DNA, 1656 bp, Triticum aestivum
  Triticum aestivum (Wheat)
  CDS (93)..(1505)
ctcgtgccgaattcggcacgaggctacgtggccgccggacggcgaggacaagcaactgagcaaggtataggtaggtagatcagtcgggcaagatgtcggtgccggtggcgtaccaggggaacacgtcggcggcggtggccgactggctgaacaagggcgacaacgcgtggcagctgacggcgtccacgctggtgggcctcatgagcgtgccgggcatggtggtgctgtacggcggcgtggtgaagaagaagtgggcggtcaactccgccttcatggcgctctacgccttcgccgccgtctggatctgctgggtcgtctgggcctacaacatgtccttcggcgaggagctgctcccgttctggggcaaggccggcccggcgctcgaccaggccttcctcgtcggccgcgcctcgctcccggccaccgcgcactaccgcgcagacggcacgctcgagacggccatggtggagccctacttccccatggccaccgtcgtctacttccagtgcgtgttcgccgccatcacgctcatcctggtggccgggtcgctgctgggccgcatgagcttcctggcgtggatgctcttcgtgccgctctggctcaccttctcctacaccgtcggcgccttctccgtgtggggcggcggcttcctcttccactggggcgtcatcgactactgcggcggctacgtcatccacatccccgccggcgtcgccggcttcaccgccgcgtactgggtcgggccaaggaccaagaaggacagggagagcttcccgcccaacaacatcctgttcgcgctcaccggcgccgggctgctgtggatggggtgggccgggttcaacggcggcgggccgtacgcggccaatgtcgactcgtccatggccatcctgaacaccaacatctgcacggcggcgagcctcatcgtctggacctgcctcgatgccgtcttcttcaagaagccctccgtggtcggcgccgtccaggccgtgatcaccggtctcgtctgcatcacgccaggcgcaggtgtcgtgcagggttgggcggcgctggttatgggcgtgctggccggcagtgtgccgtggtacaccatgatggtgctccacaagcgctccaagctccttcaacgcgtcgacgacacccttggcgtcatccacacccacggcgtcgccggcctgctgggcggcgtcctcacgggcctcttcgccgagccgaacctctgcaatctattccttccggtcaccaactcccggggcgccttctacggtggtaacggtggggcgcagctcgggaagcagatcgccggagcgctcttcgtgatcgggtggaacgtggtcgtcacgtccattatctgcgtcgtcatccgccttgtcgtcccgctgcgcatgtccgaggagaagctcgccattggcgacgacgccgtgcacggcgaggaggcctacgcgttgtggggcgatggcgagcactacgatgacaccaagcacggcgccgccgtcgtgccggtgtgattttctctgctttgcttccttgttatgtttgtcccgtctatattgtgtcctgctttattttctcttgtctcttgccttccaaatgtaaatttgtagctcatgtataatgtgaccaaaattttcatagataaaaaaaaaaaaaaaaaaaaaa

SEQ ID NO: 938 - protein, 470 aa, Triticum aestivum
  Triticum aestivum (Wheat)
MSVPVAYQGNTSAAVADWLNKGDNAWQLTASTLVGLMSVPGMVVLYGGVVKKKWAVNSAFMALYAFAAVWICWVVWAYNMSFGEELLPFWGKAGPALDQAFLVGRASLPATAHYRADGTLETAMVEPYFPMATVVYFQCVFAAITLILVAGSLLGRMSFLAWMLFVPLWLTFSYTVGAFSVWGGGFLFHWGVIDYCGGYVIHIPAGVAGFTAAYWVGPRTKKDRESFPPNNILFALTGAGLLWMGWAGFNGGGPYAANVDSSMAILNTNICTAASLIVWTCLDAVFFKKPSVVGAVQAVITGLVCITPGAGVVQGWAALVMGVLAGSVPWYTMMVLHKRSKLLQRVDDTLGVIHTHGVAGLLGGVLTGLFAEPNLCNLFLPVTNSRGAFYGGNGGAQLGKQIAGALFVIGWNVVVTSIICVVIRLVVPLRMSEEKLAIGDDAVHGEEAYALWGDGEHYDDTKHGAAVVPV

SEQ ID NO: 939 - DNA, 1278 bp, Mycobacterium paratuberculosis
  CDS (1)..(1278)
atgcacggaatcgatccggccgccacggcctggctgctggccagcaccgcgctggtgttgctgatgacccccggcctggcgatcttctacggcggcatggtccgcaccaccggcgtgctcaacatgatcatgatgagcttcatctccatccccctggtgaccgtggcctggttgctggtcggctacacgatggcgttctcccaggacgggatgagcgggctggtgggcaatctgcggcatttcgggatgctcggcatcactcccgacaccacccacggcgcggtccccgaattgctgtacgccactttccaattgacgttcgcgatcatcaccgcggcgctggtcagcggcgcgatcgccgaccgcgccaagttcgccgcctggatggttttcgtcccggtgtggacggttgcggtgtattcggttgtggcgcaatgggtctgggggccgggcggctggctggcccggctgggcgtgctggactatgcgggtgggctggtggtcgagatcgtctccggcagctccgcgctggccctggcgctggtgctcgggccgcggatcggcttcaagaaggacgccatgcggccgcacaatctgccgctgctgttcgtcggcgtcgggctgctgtggttcggctggttcgggttcaacgccggatcggcgttggcggccaacggaaccgccgcggccatcttcctcaacaccctggtggccggctgcctgggcatgctgggctggctgtcggtcgagcagatccgcgacgggcggcccaccacgttcggcgccgcctcgggcgtggtcgccggcctggtcgccatcaccccgtcctgcggcaccgtcaacacgctgggggcgacggtggtcgggctggcggccggcgtcgtgtgctcgttcgcggcgggcgcgaaactgcgcttcaactatgacgattcgctcgacgtggtcggtgtgcacttcgtcggcggggtggtcggggtgtcgctgatcgggctgttcgccaccgcggtcatgacggcgggcccgcaggggctgttctacggcggcggcgtggcccagctgggcaagcaggcgctggcgatcgcggtggtggcgctctacgcgttcaccgtgtcgttcctgctggccaaggtcatcgaccgggtgatgggcttccgggtcagcgccgaggacgagaccaccggcgtcgacctgacccagcacgccgagaccgcctacgccgagggcgtgcacggtcatctgccgcagcgccgcccgggccccggcgaccggttgaagtag

SEQ ID NO: 940 - protein, 425 aa, Mycobacterium paratuberculosis
MHGIDPAATAWLLASTALVLLMTPGLAIFYGGMVRTTGVLNMIMMSFISIPLVTVAWLLVGYTMAFSQDGMSGLVGNLRHFGMLGITPDTTHGAVPELLYATFQLTFAIITAALVSGAIADRAKFAAWMVFVPVWTVAVYSVVAQWVWGPGGWLARLGVLDYAGGLVVEIVSGSSALALALVLGPRIGFKKDAMRPHNLPLLFVGVGLLWFGWFGFNAGSALAANGTAAAIFLNTLVAGCLGMLGWLSVEQIRDGRPTTFGAASGVVAGLVAITPSCGTVNTLGATVVGLAAGVVCSFAAGAKLRFNYDDSLDVVGVHFVGGVVGVSLIGLFATAVMTAGPQGLFYGGGVAQLGKQALAIAVVALYAFTVSFLLAKVIDRVMGFRVSAEDETTGVDLTQHAETAYAEGVHGHLPQRRPGPGDRLK

SEQ ID NO: 941 - DNA, 1440 bp, Mycobacterium paratuberculosis
  CDS (1)..(1440)
atgcgagtgacatacccgatactgggccagcccaataccggcgataccgcctggatgctggccagttccgcgctggtgctgttgatgacgccgggtctggcgtttttctacggcgggatggtgcgcgccagaagcgtgctgaacatgctcatgatgagcatcagcgcgatgggcgtggtcaccgtgctgtgggtgctttacggctattcggtcgccttcggcgacgacgtcggcaacttcatgggcaagccgacgtcctactggggcctcaagggtctcatcggcgtcaacgcggtggccgccgacccgagcaaaggcactgcggcaacggacattccgctggccggcacgctgccggccaccgtgttcgtggccttccagctgatgttcgcgatcatcaccgtcgccctgatctccggcgcggtgtccgaccggctgaagttcgccgcctggctggtgttcgccggcctgtgggcgacgttcgtctatttcccggtggcgcactgggtgttcgcgttcgacggcttcgcctccgagcacggcggctggatcgccaacaagctgcacgcgatcgacttcgccggcgggacggcggtgcacatcaattccggtgtggcgggcctgatgctggcgatcgtgctgggcaagcgccgcggctggcccaccacgttgttccggccgcacaacctgccgttcgtgatgctgggcgccgggctgctgtggttcggctggtacgggttcaacgccggatcggccaccagctccaacggcgcggcggggtcgacgttcatgacgacgacgatcgcgaccgccaccgcgatgctggcctggatgctcaccgaacgcatccgcgacggcaaggccaccacgttgggcgcggcgtccgggatcgtcgccgggctggtcgccatcaccccgtcctgctcgtcggtcaacgtgctgggcgcgctggtggtgggcctggtggccggcgtggtgtgcgcgctggcggtcggcctgaaattcaagctgggctttgacgactcgctcgacgtggtcggggtgcacctggtcggcgggttggccggcaccctgctggtgggcctgctggccgccccggagagcccggccatcagcggcgttaccggcgtgtccaagggactgttctacggcggcggctgggcgcagctggaacggcaggcggtcggcgcgttcagcgtcctcatctactctggggtggttacgctgatcctggcgttgatcctgaagtacacgatggggcttcgtctcaacccggaggccgaagcctcgggtatcgacgaggctgagcacgccgagagtggttacgatttcgccgtggctaccggctcggttctcccgccccgggtcgctgtggcggatacccgcaacggcctggaggagcagcgagtgggcgacaaagtggaggcagagcagtcatga

SEQ ID NO: 942 - protein, 479 aa, Mycobacterium paratuberculosis
MRVTYPILGQPNTGDTAWMLASSALVLLMTPGLAFFYGGMVRARSVLNMLMMSISAMGVVTVLWVLYGYSVAFGDDVGNFMGKPTSYWGLKGLIGVNAVAADPSKGTAATDIPLAGTLPATVFVAFQLMFAIITVALISGAVSDRLKFAAWLVFAGLWATFVYFPVAHWVFAFDGFASEHGGWIANKLHAIDFAGGTAVHINSGVAGLMLAIVLGKRRGWPTTLFRPHNLPFVMLGAGLLWFGWYGFNAGSATSSNGAAGSTFMTTTIATATAMLAWMLTERIRDGKATTLGAASGIVAGLVAITPSCSSVNVLGALVVGLVAGVVCALAVGLKFKLGFDDSLDVVGVHLVGGLAGTLLVGLLAAPESPAISGVTGVSKGLFYGGGWAQLERQAVGAFSVLIYSGVVTLILALILKYTMGLRLNPEAEASGIDEAEHAESGYDFAVATGSVLPPRVAVADTRNGLEEQRVGDKVEAEQS

SEQ ID NO: 943 - DNA, 1236 bp, Bacillus cereus
  Bacillus cereus ATCC 10987
  CDS (1)..(1236)
atgaatacaggagatacggtttttatgtttgtagcgacagtaatggtcatgttaatgacaccaggattagcacttttttatggaggtatggttcgcagtaaaaacgtactcagtacgacaatgcatagttatagcgcaatggctatcgtttcgattcaatggattgtaattggttattctttatcattcggacccgattggcacggacttatcggcacattcaattggttcggtttaaacggagttacctacgcaccaaatccagactactcatctactattcctcacaatttatttatgatgtttcaactcatgtttgctattctaacccccgctctaatttcaggagcatttgccgaaagaatgcgattttcagctttccttattttcatccttctatggacaacaatcgtttacaatcctgtcgctcattgggtatggggcgttggcggatggctaagagaacttggcgcattagacttcgctggcggtaatgtcgttcatattacatctggcgtggctggcctcgtattagctattttccttggaaaacgaaaaaacataaacggttcgtctcctcatcatttaccatttacgatgttaggcgctgggctgctatggttcggctggttcggttttaacgtcggaagcgcattatctttaaatgatgtagctttaactgcatttattaatacaaatatagctgccgctgcctccgcattaacttggatgctttcagagtggttcttccaatcaaaaccgaccgcgatgggagctgcttgtggcgccgtttccggtctagtcgctattacaccagcttgcgggttcgttacacctttctcagctcttcttatcggagcaattggcggcgtattatgcttcggagcggtctttttcttaaaaacaaaattcggatacgacgatacactcgatgcatttggatgtcacggcatcggcggaacttggggcggcattgcgacaggactatttgcaactactaccgtaaacagcgatggcgctaacggattattttacggaaacgccgcgttgctgtttaaacaacttgtagcaatcggcgcaacatatgcgttcacaattataatgacgtacgcgattattaaagcaattaacttcttcctccctgtccgggtagatgagcacgaggaacatatgggacttgatatttcaatgcatggggagaaagcttatgagtatgtagaaaaatcggctaattaa

SEQ ID NO: 944 - protein, 411 aa, Bacillus cereus
  Bacillus cereus ATCC 10987
MNTGDTVFMFVATVMVMLMTPGLALFYGGMVRSKNVLSTTMHSYSAMAIVSIQWIVIGYSLSFGPDWHGLIGTFNWFGLNGVTYAPNPDYSSTIPHNLFMMFQLMFAILTPALISGAFAERMRFSAFLIFILLWTTIVYNPVAHWVWGVGGWLRELGALDFAGGNVVHITSGVAGLVLAIFLGKRKNINGSSPHHLPFTMLGAGLLWFGWFGFNVGSALSLNDVALTAFINTNIAAAASALTWMLSEWFFQSKPTAMGAACGAVSGLVAITPACGFVTPFSALLIGAIGGVLCFGAVFFLKTKFGYDDTLDAFGCHGIGGTWGGIATGLFATTTVNSDGANGLFYGNAALLFKQLVAIGATYAFTIIMTYAIIKAINFFLPVRVDEHEEHMGLDISMHGEKAYEYVEKSAN

SEQ ID NO: 945 - DNA, 1332 bp, Rhodopseudomonas palustris
  CDS (1)..(1332)
atgaccttgttgctacgccgcgcggcgtcggccgcgacgggctacatacttgcaacattcggccttgcggcagtcggcgtcacgccggcgctggcgcaggggatggccacggcggcgccgggcatcagcccggccgacaccgcctggatgacggtcgccaccgccttcgtgctgatgatgacgatccccggcctggcgctgttctactccggcatggtgcgcaagaagaacgtgctggccacgatggcgcagagcctcgcggctgtggcgctgatctcgatcctgtgggtggcattcggctactcgctggccttcaccggcagcggcagcctgatcggctcgttcgaccggatcttcctggccggcatgaccatggacagcgtcaatccggcggccaagaccatcccggaagcgctgttcatgctctatcagatgactttcgcggtcatcacggtggccctggtggccggctcggtcgccgaccggatgcggttttccgcctatctgttgttctcgatcggctggttcatcttcgtctatgtgccgctggcgcattggatctggggcggcggctttttgggcgcaatgggcgtgctggacttcgccggcggcctggtggtgcacctgtcggccggcaccgggggcttggtggcggcgatcgtgatcggccgccgccatggctacggcatggaaaacctgtcgccgttcgacctgtcgctggcggtgatcggcactggcctgttgtgggtcggctggttcggattcaatggcggctccgccctggcggcggattcccgtgcggtgttcgccatcacggcgacgcatctggcggcgtgctcgggcgcgctgacctggggcgcaatcgaatggatggcgcggcgcaagccgtcggtgctgggcatgatttccggtgccgtcgccggcctcggcaccatcacaccggcatcgggctatgtcgaaccctggcacggcgtggtgatcggcatcgtcgccggcctgatctgttactgggcctgcacttggctgaagcaccggctgcgctacgacgactcgctcgacgtgttcggcgtccacggcatcggcggcctgaccggcacgttcctggccggcattttcgccacagcctcgatcggtggcgtctcgggcgccctcgagggttcgtggatgcagccgctgacgcagctcgccggtattctagtcaccttcgtgtggtccgccgtggccacctatgtgttgctgaaggccgtcagcctgttcgtggcgctgcgcgtctcccgtgagcacgagatcgaaggcctggacatttcgcagcatggcgaggcgctgcagtaa

SEQ ID NO: 946 - protein, 443 aa, Rhodopseudomonas palustris
MTLLLRRAASAATGYILATFGLAAVGVTPALAQGMATAAPGISPADTAWMTVATAFVLMMTIPGLALFYSGMVRKKNVLATMAQSLAAVALISILWVAFGYSLAFTGSGSLIGSFDRIFLAGMTMDSVNPAAKTIPEALFMLYQMTFAVITVALVAGSVADRMRFSAYLLFSIGWFIFVYVPLAHWIWGGGFLGAMGVLDFAGGLVVHLSAGTGGLVAAIVIGRRHGYGMENLSPFDLSLAVIGTGLLWVGWFGFNGGSALAADSRAVFAITATHLAACSGALTWGAIEWMARRKPSVLGMISGAVAGLGTITPASGYVEPWHGVVIGIVAGLICYWACTWLKHRLRYDDSLDVFGVHGIGGLTGTFLAGIFATASIGGVSGALEGSWMQPLTQLAGILVTFVWSAVATYVLLKAVSLFVALRVSREHEIEGLDISQHGEALQ

SEQ ID NO: 947 - DNA, 1443 bp, Rhodopseudomonas palustris
  CDS (1)..(1443)
atgacgttcaaacgtccctacggcgcgggactggcggtccttgcggccggcatgttcgccgcaaccgcggcctacgccgagccaacggtcaacaagggcgacaacgcctggatgctcacctcgacggtgctggtgctgttgatgaccatcccaggcctggcgctgttctacggcggtctggtccgctccaagaacatgctctcggtgctggcgcaggtgttctacaccgtgtgtatcgcctgcattatttgggctctgtacggctacagcctcgccttcaccggcggttcggacttcatcggcggcttctccaaggcgttcctcgccggcgtgaccaccgactccaaggccgcgaccttctcggtcgacgccaacatctcggagctggtttacgtatgcttccagatgaccttctgcgcgatcactcccgcgctgatcgtcggcgccttcgctgagcgcacccggttcgccgccgtggcgctgttcatcccgctgtggatcaccctgatctacctgccgatggcccacatggtctggtactgggccggtccggacgcgatcaacgacgccgccaaggcgctcgctgccgctgccgacgaagccgccaagaccgccgcgcaggccaagctcgacgaagtcaacgccgactccggcttcctgttcaagaagggcgcgatcgacttcgcgggcggcaccgtggtgcacatcaacgccggtatcgccggtctggtgggcgccctgctggtcggccgtcgcaccggctacggcaaggagttgatggccccgcactcgctgaccatgaccatgatcggcgcctcgctgctctgggtcggctggttcggcttcaacgccggttcgaacctcgaagcttcgggcggcgctgcgctcgccatgaccaactccttcgtcgcgactgcggcggcggcgctgtcgtggatgttcgccgagtggatcttcaagggtcatccgtcggtgctcggtgcgctgtcgggcgccgttgccggtctggtcgcggtcaccccggctgccggcttctccggcccgatgggcgcgatcgtgctcggcctggtggtcggcgtggtctgcctgttcttctgcaccgtggtgaagaacgcgctgaagtatgacgactcgctcgacgtgttcggcgtccacgcggtcggcggcatcgtcggcgcgatcggcaccggcatcctggtgaacccggctctcggcggcaccggcgtgtacgactacgtggccggcaaggtcggcgactacgacatgaccacccagctgatctcgcagtgctggggcgtgggcaccaccgtgctgctgtccggtatcggctcggcgatcctctacaaggtcgtcgacgtgatcgtcggtctgcgggccccggtggaagtcgaacgcgaaggcctcgacctcgtcgagcacaccgagcgcgcttacaacatgtaa

SEQ ID NO: 948 - protein, 480 aa, Rhodopseudomonas palustris
MTFKRPYGAGLAVLAAGMFAATAAYAEPTVNKGDNAWMLTSTVLVLLMTIPGLALFYGGLVRSKNMLSVLAQVFYTVCIACIIWALYGYSLAFTGGSDFIGGFSKAFLAGVTTDSKAATFSVDANISELVYVCFQMTFCAITPALIVGAFAERTRFAAVALFIPLWITLIYLPMAHMVWYWAGPDAINDAAKALAAAADEAAKTAAQAKLDEVNADSGFLFKKGAIDFAGGTVVHINAGIAGLVGALLVGRRTGYGKELMAPHSLTMTMIGASLLWVGWFGFNAGSNLEASGGAALAMTNSFVATAAAALSWMFAEWIFKGHPSVLGALSGAVAGLVAVTPAAGFSGPMGAIVLGLVVGVVCLFFCTVVKNALKYDDSLDVFGVHAVGGIVGAIGTGILVNPALGGTGVYDYVAGKVGDYDMTTQLISQCWGVGTTVLLSGIGSAILYKVVDVIVGLRAPVEVEREGLDLVEHTERAYNM

SEQ ID NO: 949 - DNA, 21 bp, Artificial sequence
  Primer
atggctcggggtgacggacat

SEQ ID NO: 950 - DNA, 25 bp, Artificial sequence
  Primer
tcatgcttcttttgcgtgatgcaat

SEQ ID NO: 951 - protein, 547 aa, Artificial sequence
  Consensus sequence
  Variant (3)..(4): Xaa in position 3 to 4 is any amino acid
  Variant (6)..(8): Xaa in position 6 to 8 is any amino acid
  Variant (10)..(15): Xaa in position 10 to 15 is any amino acid
  Variant (17)..(18): Xaa in position 17 to 18 is any amino acid
  Variant (20)..(20): Xaa in position 20 is any amino acid
  Variant (22)..(44): Xaa in position 22 to 44 is any amino acid
  Variant (46)..(49): Xaa in position 46 to 49 is any amino acid
  Variant (51)..(111): Xaa in position 51 to 111 is any amino acid
  Variant (113)..(114): Xaa in position 113 to 114 is any amino acid
  Variant (117)..(124): Xaa in position 117 to 124 is any amino acid
  Variant (126)..(129): Xaa in position 126 to 129 is any amino acid
  Variant (131)..(138): Xaa in position 131 to 138 is any amino acid
  Variant (140)..(147): Xaa in position 140 to 147 is any amino acid
  Variant (149)..(155): Xaa in position 149 to 155 is any amino acid
  Variant (157)..(200): Xaa in position 157 to 200 is any amino acid
  Variant (202)..(203): Xaa in position 202 to 203 is any amino acid
  Variant (209)..(210): Xaa in position 209 to 210 is any amino acid
  Variant (213)..(215): Xaa in position 213 to 215 is any amino acid
  Variant (217)..(219): Xaa in position 217 to 219 is any amino acid
  Variant (221)..(226): Xaa in position 221 to 226 is any amino acid
  Variant (228)..(228): Xaa in position 228 is any amino acid
  Variant (230)..(286): Xaa in position 230 to 286 is any amino acid
  Variant (288)..(294): Xaa in position 288 to 294 is any amino acid
  Variant (296)..(298): Xaa in position 296 to 298 is any amino acid
  Variant (301)..(301): Xaa in position 301 is any amino acid
  Variant (304)..(304): Xaa in position 304 is any amino acid
  Variant (308)..(308): Xaa in position 308 is any amino acid
  Variant (311)..(340): Xaa in position 311 to 340 is any amino acid
  Variant (342)..(372): Xaa in position 342 to 372 is any amino acid
  Variant (374)..(376): Xaa in position 374 to 376 is any amino acid
  Variant (380)..(380): Xaa in position 380 is any amino acid
  Variant (383)..(396): Xaa in position 383 to 396 is any amino acid
  Variant (398)..(421): Xaa in position 398 to 421 is any amino acid
  Variant (424)..(424): Xaa in position 424 is any amino acid
  Variant (426)..(430): Xaa in position 426 to 430 is any amino acid
  Variant (432)..(434): Xaa in position 432 to 434 is any amino acid
  Variant (436)..(437): Xaa in position 436 to 437 is any amino acid
  Variant (439)..(442): Xaa in position 439 to 442 is any amino acid
  Variant (444)..(494): Xaa in position 444 to 494 is any amino acid
  Variant (496)..(532): Xaa in position 496 to 532 is any amino acid
  Variant (534)..(535): Xaa in position 534 to 535 is any amino acid
  Variant (537)..(537): Xaa in position 537 is any amino acid
  Variant (539)..(541): Xaa in position 539 to 541 is any amino acid
  Variant (543)..(546): Xaa in position 543 to 546 is any amino acid
LVXXMXXXGXXXXXXGXXRXKXXXXXXXXXXXXXXXXXXXXXXXGXXXXFXXXXXXXXXXXXXXXXXXXXXXXXXXXXXXXXXXXXXXXXXXXXXXXXXXXXXXXXXXXXXQXXFAXXXXXXXXGXXXXRXXXXXXXXFXXXXXXXXYXXXXXXXWXXXXXXXXXXXXXXXXXXXXXXXXXXXXXXXXXXXXXXXXXXXXGXXDFAGGXXVHXXXGXXXLXXXXXXGXRXXXXXXXXXXXXXXXXXXXXXXXXXXXXXXXXXXXXXXXXXXXXXXXXXXXXXXXXXHXXXXXXXGXXXLWXGWXGFNXGSXXXXXXXXXXXXXXXXXXXXXXXXXXXXXXTXXXXXXXXXXXXXXXXXXXXXXXXXXXXXXXGXXXGLVXITXXXXXXXXXXXXXXGXXXXXXXXXXXXXXXXXXXXXXXXDDXLXXXXXHXXXGXXGXXXXGXXXXXXXXXXXXXXXXXXXXXXXXXXXXXXXXXXXXXXXXXXXXXXXXXXXQXXXXXXXXXXXXXXXXXXXXXXXXXXXXXXXXXXXXXEXXGXDXXXHXXXXY

SEQ ID NO: 952 - protein, 26 aa, Artificial sequence
  Consensus sequence
  Variant (1)..(1): Xaa in position 1 is Asp or Glu
  Variant (2)..(2): Xaa in position 2 is Phe, Tyr or Trp
  Variant (3)..(3): Xaa in position 3 is Ala, Ser, Pro or Cys
  Variant (5)..(8): Xaa in position 5 to 8 is any amino acid
  Variant (9)..(9): Xaa in position 9 is His or Glu
  Variant (10)..(12): Xaa in position 10 to 12 is any amino acid
  Variant (13)..(13): Xaa in position 13 is Gly or Ala
  Variant (14)..(23): Xaa in position 14 to 23 is any amino acid
  Variant (24)..(24): Xaa in position 24 is Gly, Ser, Asp, Lys or Arg
  Variant (25)..(25): Xaa in position 25 is any amino acid
  Variant (26)..(26): Xaa in position 26 is Arg, Gly or Pro
XXXGXXXXXXXXXXXXXXXXXXXXXX

SEQ ID NO: 953 - protein, 16 aa, Artificial sequence
  Consensus sequence
  Variant (1)..(1): Xaa in position 1 is Gly or Ser
  Variant (2)..(4): Xaa in position 2 to 4 is any amino acid
  Variant (5)..(5): Xaa in position 5 is Leu, Ile or Val
  Variant (6)..(6): Xaa in position 6 is Trp, Met, Ala, Phe, Tyr or Val
  Variant (7)..(7): Xaa in position 7 is any amino acid
  Variant (8)..(8): Xaa in position 8 is Gly, Ala or Ser
  Variant (9)..(9): Xaa in position 9 is Trp or Phe
  Variant (10)..(10): Xaa in position 10 is any amino acid
  Variant (11)..(11): Xaa in position 11 is Gly, Ala, Cys, Phe or Leu
  Variant (12)..(12): Xaa in position 12 is Phe or Tyr
  Variant (13)..(13): Xaa in position 13 is Asn, Thr or Asp
  Variant (14)..(14): Xaa in position 14 is any amino acid
  Variant (15)..(15): Xaa in position 15 is Gly, Ala or Met
  Variant (16)..(16): Xaa in position 16 is Ser, Thr, Gly, Asp or Ala
XXXXXXXXXXXXXXXX

SEQ ID NO: 954 - protein, 22 aa, Artificial sequence
  Consensus sequence
  Variant (1)..(1): Xaa in position 1 is Asp, Val, Asn or His
  Variant (2)..(2): Xaa in position 2 is Asp or Glu
  Variant (3)..(9): Xaa in position 3 to 9 is any amino acid
  Variant (11)..(13): Xaa in position 11 to 13 is any amino acid
  Variant (15)..(16): Xaa in position 15 to 16 is any amino acid
  Variant (17)..(17): Xaa in position 17 is Gly, Ser or Ala
  Variant (18)..(21): Xaa in position 18 to 21 is any amino acid
  Variant (22)..(22): Xaa in position 22 is Gly, Ala, Ser, Ile or Met
XXXXXXXXXHXXXGXXXXXXXX

SEQ ID NO: 955 - DNA, 1608 bp, Brassica napus
  CDS (18)..(1529)
caccaatctctcccaacatgtcgggatctttatcttgctctgctgccgacctcgcagtcttgttaggccctaatgccacggctgcagctgactacatctgcggccaacttagcaccgttaacaacaaatttaccgacgttgctttcgccgtagacaacacataccttctcttctccgcttacctcgtcttctctatgcaactgggcttcgctatgctctgcgctggctctgtaagagccaagaacacgatgaacatcatgcttaccaacgtccttgacgctgcagctggaggtctcttctattatcttttcggttacgcctttgcctttggatctccctcaaacggcttcatcggaaaacacaaccttggtctcaaggactttccttcagcctccgccgactactctaactttctataccaatgggcttttgctatcgccgctgccggaatcaccagcggctccatcgctgaacggactcagtttgttgcatacctgatctattcatccttcttaacaggctttgtttacccagttgtttctcactggttctggtctgctgatgggtgggctagtccttttaggaccgacggagatctacttttcagcacaggagcaatcgatttcgctggctcgggtgttgttcacatggttggaggcatcgctggtctatggggtgcgttgatcgaaggtccacgacttggtcggtttgataacggtggacgagctatagccctacatggccactcggcctcactagttgtccttggaacattcctcctttggtttggatggtatggattcaaccctggttccttcaacaagatcctcgtcacttatgaatcaggcacgatcaacgggcagtggagcgctgtcggacggactgctgtcacaaccactttagctggctgcactgcggcgctcacaaccctcttcgggaaacgtcttctctcgggacactggaacgttactgacgtatgcaacggcctccttggagggtttgcagctataaccggtggctgttcggtcgtagagccttgggcggcgatcatctgcgggttcgtagcggccctggtactcctcgggtgcaacaagctcgcggagaaactcaaatacgatgacccgctcgaggcagcccagttacacggtgggtgcggagcctgggggctaatatttactgcactttttgctagagaaaagtacttgaaccagatctacggcgagaagcccggaaggccccacggtttgttcatgggcggtggaggaaaactgcttggagctcagcttattcaaatacttgttatcacaggttgggtaagtgcgaccatgggaacgcttttcttcatcctcaagaaaatgaaactgttgcgtatatctgctgaggatgagatggccggtatggatatgaccaggcatggtggctttgcttatatgtactatgatgatgatgagtctcacaaagccattcagctaaggaaagttgagcatagatctccttcaccttcgggtgttactaccacttctgtttgatttagatttttattttgtaagagtatttatcatggtctgggatactctaatatatgtttgatattaaaaaaaaaaaaaa

SEQ ID NO: 956 - protein, 503 aa, Brassica napus
MSGSLSCSAADLAVLLGPNATAAADYICGQLSTVNNKFTDVAFAVDNTYLLFSAYLVFSMQLGFAMLCAGSVRAKNTMNIMLTNVLDAAAGGLFYYLFGYAFAFGSPSNGFIGKHNLGLKDFPSASADYSNFLYQWAFAIAAAGITSGSIAERTQFVAYLIYSSFLTGFVYPVVSHWFWSADGWASPFRTDGDLLFSTGAIDFAGSGVVHMVGGIAGLWGALIEGPRLGRFDNGGRAIALHGHSASLVVLGTFLLWFGWYGFNPGSFNKILVTYESGTINGQWSAVGRTAVTTTLAGCTAALTTLFGKRLLSGHWNVTDVCNGLLGGFAAITGGCSVVEPWAAIICGFVAALVLLGCNKLAEKLKYDDPLEAAQLHGGCGAWGLIFTALFAREKYLNQIYGEKPGRPHGLFMGGGGKLLGAQLIQILVITGWVSATMGTLFFILKKMKLLRISAEDEMAGMDMTRHGGFAYMYYDDDESHKAIQLRKVEHRSPSPSGVTTTSV

SEQ ID NO: 957 - DNA, 9043 bp, Artificial sequence
  vector
actttgatccaacccctccgctgctatagtgcagtcggcttctgacgttcagtgcagccgtcttctgaaaacgacatgtcgcacaagtcctaagttacgcgacaggctgccgccctgcccttttcctggcgttttcttgtcgcgtgttttagtcgcataaagtagaatacttgcgactagaaccggagacattacgccatgaacaagagcgccgccgctggcctgctgggctatgcccgcgtcagcaccgacgaccaggacttgaccaaccaacgggccgaactgcacgcggccggctgcaccaagctgttttccgagaagatcaccggcaccaggcgcgaccgcccggagctggccaggatgcttgaccacctacgccctggcgacgttgtgacagtgaccaggctagaccgcctggcccgcagcacccgcgacctactggacattgccgagcgcatccaggaggccggcgcgggcctgcgtagcctggcagagccgtgggccgacaccaccacgccggccggccgcatggtgttgaccgtgttcgccggcattgccgagttcgagcgttccctaatcatcgaccgcacccggagcgggcgcgaggccgccaaggcccgaggcgtgaagtttggcccccgccctaccctcaccccggcacagatcgcgcacgcccgcgagctgatcgaccaggaaggccgcaccgtgaaagaggcggctgcactgcttggcgtgcatcgctcgaccctgtaccgcgcacttgagcgcagcgaggaagtgacgcccaccgaggccaggcggcgcggtgccttccgtgaggacgcattgaccgaggccgacgccctggcggccgccgagaatgaacgccaagaggaacaagcatgaaaccgcaccaggacggccaggacgaaccgtttttcattaccgaagagatcgaggcggagatgatcgcggccgggtacgtgttcgagccgcccgcgcacgtctcaaccgtgcggctgcatgaaatcctggccggtttgtctgatgccaagctggcggcctggccggccagcttggccgctgaagaaaccgagcgccgccgtctaaaaaggtgatgtgtatttgagtaaaacagcttgcgtcatgcggtcgctgcgtatatgatgcgatgagtaaataaacaaatacgcaaggggaacgcatgaaggttatcgctgtacttaaccagaaaggcgggtcaggcaagacgaccatcgcaacccatctagcccgcgccctgcaactcgccggggccgatgttctgttagtcgattccgatccccagggcagtgcccgcgattgggcggccgtgcgggaagatcaaccgctaaccgttgtcggcatcgaccgcccgacgattgaccgcgacgtgaaggccatcggccggcgcgacttcgtagtgatcgacggagcgccccaggcggcggacttggctgtgtccgcgatcaaggcagccgacttcgtgctgattccggtgcagccaagcccttacgacatatgggccaccgccgacctggtggagctggttaagcagcgcattgaggtcacggatggaaggctacaagcggcctttgtcgtgtcgcgggcgatcaaaggcacgcgcatcggcggtgaggttgccgaggcgctggccgggtacgagctgcccattcttgagtcccgtatcacgcagcgcgtgagctacccaggcactgccgccgccggcacaaccgttcttgaatcagaacccgagggcgacgctgcccgcgaggtccaggcgctggccgctgaaattaaatcaaaactcatttgagttaatgaggtaaagagaaaatgagcaaaagcacaaacacgctaagtgccggccgtccgagcgcacgcagcagcaaggctgcaacgttggccagcctggcagacacgccagccatgaagcgggtcaactttcagttgccggcggaggatcacaccaagctgaagatgtacgcggtacgccaaggcaagaccattaccgagctgctatctgaatacatcgcgcagctaccagagtaaatgagcaaatgaataaatgagtagatgaattttagcggctaaaggaggcggcatggaaaatcaagaacaaccaggcaccgacgccgtggaatgccccatgtgtggaggaacgggcggttggccaggcgtaagcggctgggttgtctgccggccctgcaatggcactggaacccccaagcccgaggaatcggcgtgacggtcgcaaaccatccggcccggtacaaatcggcgcggcgctgggtgatgacctggtggagaagttgaaggccgcgcaggccgcccagcggcaacgcatcgaggcagaagcacgccccggtgaatcgtggcaagcggccgctgatcgaatccgcaaagaatcccggcaaccgccggcagccggtgcgccgtcgattaggaagccgcccaagggcgacgagcaaccagattttttcgttccgatgctctatgacgtgggcacccgcgatagtcgcagcatcatggacgtggccgttttccgtctgtcgaagcgtgaccgacgagctggcgaggtgatccgctacgagcttccagacgggcacgtagaggtttccgcagggccggccggcatggccagtgtgtgggattacgacctggtactgatggcggtttcccatctaaccgaatccatgaaccgataccgggaagggaagggagacaagcccggccgcgtgttccgtccacacgttgcggacgtactcaagttctgccggcgagccgatggcggaaagcagaaagacgacctggtagaaacctgcattcggttaaacaccacgcacgttgccatgcagcgtacgaagaaggccaagaacggccgcctggtgacggtatccgagggtgaagccttgattagccgctacaagatcgtaaagagcgaaaccgggcggccggagtacatcgagatcgagctagctgattggatgtaccgcgagatcacagaaggcaagaacccggacgtgctgacggttcaccccgattactttttgatcgatcccggcatcggccgttttctctaccgcctggcacgccgcgccgcaggcaaggcagaagccagatggttgttcaagacgatctacgaacgcagtggcagcgccggagagttcaagaagttctgtttcaccgtgcgcaagctgatcgggtcaaatgacctgccggagtacgatttgaaggaggaggcggggcaggctggcccgatcctagtcatgcgctaccgcaacctgatcgagggcgaagcatccgccggttcctaatgtacggagcagatgctagggcaaattgccctagcaggggaaaaaggtcgaaaaggtctctttcctgtggatagcacgtacattgggaacccaaagccgtacattgggaaccggaacccgtacattgggaacccaaagccgtacattgggaaccggtcacacatgtaagtgactgatataaaagagaaaaaaggcgatttttccgcctaaaactctttaaaacttattaaaactcttaaaacccgcctggcctgtgcataactgtctggccagcgcacagccgaagagctgcaaaaagcgcctacccttcggtcgctgcgctccctacgccccgccgcttcgcgtcggcctatcgcggccgctggccgctcaaaaatggctggcctacggccaggcaatctaccagggcgcggacaagccgcgccgtcgccactcgaccgccggcgcccacatcaaggcaccctgcctcgcgcgtttcggtgatgacggtgaaaacctctgacacatgcagctcccggagacggtcacagcttgtctgtaagcggatgccgggagcagacaagcccgtcagggcgcgtcagcgggtgttggcgggtgtcggggcgcagccatgacccagtcacgtagcgatagcggagtgtatactggcttaactatgcggcatcagagcagattgtactgagagtgcaccatatgcggtgtgaaataccgcacagatgcgtaaggagaaaataccgcatcaggcgctcttccgcttcctcgctcactgactcgctgcgctcggtcgttcggctgcggcgagcggtatcagctcactcaaaggcggtaatacggttatccacagaatcaggggataacgcaggaaagaacatgtgagcaaaaggccagcaaaaggccaggaaccgtaaaaaggccgcgttgctggcgtttttccataggctccgcccccctgacgagcatcacaaaaatcgacgctcaagtcagaggtggcgaaacccgacaggactataaagataccaggcgtttccccctggaagctccctcgtgcgctctcctgttccgaccctgccgcttaccggatacctgtccgcctttctcccttcgggaagcgtggcgctttctcatagctcacgctgtaggtatctcagttcggtgtaggtcgttcgctccaagctgggctgtgtgcacgaaccccccgttcagcccgaccgctgcgccttatccggtaactatcgtcttgagtccaacccggtaagacacgacttatcgccactggcagcagccactggtaacaggattagcagagcgaggtatgtaggcggtgctacagagttcttgaagtggtggcctaactacggctacactagaaggacagtatttggtatctgcgctctgctgaagccagttaccttcggaaaaagagttggtagctcttgatccggcaaacaaaccaccgctggtagcggtggtttttttgtttgcaagcagcagattacgcgcagaaaaaaaggatctcaagaagatcctttgatcttttctacggggtctgacgctcagtggaacgaaaactcacgttaagggattttggtcatgcattctaggtactaaaacaattcatccagtaaaatataatattttattttctcccaatcaggcttgatccccagtaagtcaaaaaatagctcgacatactgttcttccccgatatcctccctgatcgaccggacgcagaaggcaatgtcataccacttgtccgccctgccgcttctcccaagatcaataaagccacttactttgccatctttcacaaagatgttgctgtctcccaggtcgccgtgggaaaagacaagttcctcttcgggcttttccgtctttaaaaaatcatacagctcgcgcggatctttaaatggagtgtcttcttcccagttttcgcaatccacatcggccagatcgttattcagtaagtaatccaattcggctaagcggctgtctaagctattcgtatagggacaatccgatatgtcgatggagtgaaagagcctgatgcactccgcatacagctcgataatcttttcagggctttgttcatcttcatactcttccgagcaaaggacgccatcggcctcactcatgagcagattgctccagccatcatgccgttcaaagtgcaggacctttggaacaggcagctttccttccagccatagcatcatgtccttttcccgttccacatcataggtggtccctttataccggctgtccgtcatttttaaatataggttttcattttctcccaccagcttatataccttagcaggagacattccttccgtatcttttacgcagcggtatttttcgatcagttttttcaattccggtgatattctcattttagccatttattatttccttcctcttttctacagtatttaaagataccccaagaagctaattataacaagacgaactccaattcactgttccttgcattctaaaaccttaaataccagaaaacagctttttcaaagttgttttcaaagttggcgtataacatagtatcgacggagccgattttgaaaccgcggtgatcacaggcagcaacgctctgtcatcgttacaatcaacatgctaccctccgcgagatcatccgtgtttcaaacccggcagcttagttgccgttcttccgaatagcatcggtaacatgagcaaagtctgccgccttacaacggctctcccgctgacgccgtcccggactgatgggctgcctgtatcgagtggtgattttgtgccgagctgccggtcggggagctgttggctggctggtggcaggatatattgtggtgtaaacaaattgacgcttagacaacttaataacacattgcggacgtttttaatgtactgaattaacgccgaattaagcttggacaatcagtaaattgaacggagaatattattcataaaaatacgatagtaacgggtgatatattcattagaatgaaccgaaaccggcggtaaggatctgagctacacatgctcaggttttttacaacgtgcacaacagaattgaaagcaaatatcatgcgatcataggcgtctcgcatatctcattaaagcagggcatgccggtcgagtcaaatctcggtgacgggcaggaccggacggggcggtaccggcaggctgaagtccagctgccagaaacccacgtcatgccagttcccgtgcttgaagccggccgcccgcagcatgccgcggggggcatatccgagcgcctcgtgcatgcgcacgctcgggtcgttgggcagcccgatgacagcgaccacgctcttgaagccctgtgcctccagggacttcagcaggtgggtgtagagcgtggagcccagtcccgtccgctggtggcggggggagacgtacacggtcgactcggccgtccagtcgtaggcgttgcgtgccttccaggggcccgcgtaggcgatgccggcgacctcgccgtccacctcggcgacgagccagggatagcgctcccgcagacggacgaggtcgtccgtccactcctgcggttcctgcggctcggtacggaagttgaccgtgcttgtctcgatgtagtggttgacgatggtgcagaccgccggcatgtccgcctcggtggcacggcggatgtcggccgggcgtcgttctgggctcatggtagactcgacggatccacgtgtggaagatatgaatttttttgagaaactagataagattaatgaatatcggtgttttggttttttcttgtggccgtctttgtttatattgagatttttcaaatcagtgcgcaagacgtgacgtaagtatccgagtcagtttttatttttctactaatttggtcgaagctttgggcggatcctctagattcgacggtatcgataagctcgcggatccctgaaagcgacgttggatgttaacatctacaaattgccttttcttatcgaccatgtacgtaagcgcttacgtttttggtggacccttgaggaaactggtagctgttgtgggcctgtggtctcaagatggatcattaatttccaccttcacctacgatggggggcatcgcaccggtgagtaatattgtacggctaagagcgaatttggcctgtaggatccctgaaagcgacgttggatgttaacatctacaaattgccttttcttatcgaccatgtacgtaagcgcttacgtttttggtggacccttgaggaaactggtagctgttgtgggcctgtggtctcaagatggatcattaatttccaccttcacctacgatggggggcatcgcaccggtgagtaatattgtacggctaagagcgaatttggcctgtaggatccctgaaagcgacgttggatgttaacatctacaaattgccttttcttatcgaccatgtacgtaagcgcttacgtttttggtggacccttgaggaaactggtagctgttgtgggcctgtggtctcaagatggatcattaatttccaccttcacctacgatggggggcatcgcaccggtgagtaatattgtacggctaagagcgaatttggcctgtaggatccgcgagctggtcaatcccattgcttttgaagcagctcaacattgatctctttctcgatcgagggagatttttcaaatcagtgcgcaagacgtgacgtaagtatccgagtcagtttttatttttctactaatttggtcgtttatttcggcgtgtaggacatggcaaccgggcctgaatttcgcgggtattctgtttctattccaactttttcttgatccgcagccattaacgacttttgaatagatacgctgacacgccaagcctcgctagtcaaaagtgtaccaaacaacgctttacagcaagaacggaatgcgcgtgacgctcgcggtgacgccatttcgccttttcagaaatggataaatagccttgcttcctattatatcttcccaaattaccaatacattacactagcatctgaatttcataaccaatctcgatacaccaaatcgaagatctcccgggttgctcttccatggcaatgattaattaacgaagagcaagagctcgaatttccccgatcgttcaaacatttggcaataaagtttcttaagattgaatcctgttgccggtcttgcgatgattatcatataatttctgttgaattacgttaagcatgtaataattaacatgtaatgcatgacgttatttatgagatgggtttttatgattagagtcccgcaattatacatttaatacgcgatagaaaacaaaatatagcgcgcaaactaggataaattatcgcgcgcggtgtcatctatgttactagatcgggaattggcatgcaagcttggcactggccgtcgttttacaacgtcgtgactgggaaaaccctggcgttacccaacttaatcgccttgcagcacatccccctttcgccagctggcgtaatagcgaagaggcccgcaccgatcgcccttcccaacagttgcgcagcctgaatggcgaatgctagagcagcttgagcttggatcagattgtcgtttcccgccttcagtttaaactatcagtgtttgacaggatatattggcgggtaaacctaagagaaaagagcgtttattagaataacggatatttaaaagggcgtgaaaaggtttatccgttcgtccatttgtatgtgcatgccaaccacagggttcccctcgggatcaaagt

SEQ ID NO: 958 - DNA, 9041 bp, Artificial sequence
  vector
actttgatccaacccctccgctgctatagtgcagtcggcttctgacgttcagtgcagccgtcttctgaaaacgacatgtcgcacaagtcctaagttacgcgacaggctgccgccctgcccttttcctggcgttttcttgtcgcgtgttttagtcgcataaagtagaatacttgcgactagaaccggagacattacgccatgaacaagagcgccgccgctggcctgctgggctatgcccgcgtcagcaccgacgaccaggacttgaccaaccaacgggccgaactgcacgcggccggctgcaccaagctgttttccgagaagatcaccggcaccaggcgcgaccgcccggagctggccaggatgcttgaccacctacgccctggcgacgttgtgacagtgaccaggctagaccgcctggcccgcagcacccgcgacctactggacattgccgagcgcatccaggaggccggcgcgggcctgcgtagcctggcagagccgtgggccgacaccaccacgccggccggccgcatggtgttgaccgtgttcgccggcattgccgagttcgagcgttccctaatcatcgaccgcacccggagcgggcgcgaggccgccaaggcccgaggcgtgaagtttggcccccgccctaccctcaccccggcacagatcgcgcacgcccgcgagctgatcgaccaggaaggccgcaccgtgaaagaggcggctgcactgcttggcgtgcatcgctcgaccctgtaccgcgcacttgagcgcagcgaggaagtgacgcccaccgaggccaggcggcgcggtgccttccgtgaggacgcattgaccgaggccgacgccctggcggccgccgagaatgaacgccaagaggaacaagcatgaaaccgcaccaggacggccaggacgaaccgtttttcattaccgaagagatcgaggcggagatgatcgcggccgggtacgtgttcgagccgcccgcgcacgtctcaaccgtgcggctgcatgaaatcctggccggtttgtctgatgccaagctggcggcctggccggccagcttggccgctgaagaaaccgagcgccgccgtctaaaaaggtgatgtgtatttgagtaaaacagcttgcgtcatgcggtcgctgcgtatatgatgcgatgagtaaataaacaaatacgcaaggggaacgcatgaaggttatcgctgtacttaaccagaaaggcgggtcaggcaagacgaccatcgcaacccatctagcccgcgccctgcaactcgccggggccgatgttctgttagtcgattccgatccccagggcagtgcccgcgattgggcggccgtgcgggaagatcaaccgctaaccgttgtcggcatcgaccgcccgacgattgaccgcgacgtgaaggccatcggccggcgcgacttcgtagtgatcgacggagcgccccaggcggcggacttggctgtgtccgcgatcaaggcagccgacttcgtgctgattccggtgcagccaagcccttacgacatatgggccaccgccgacctggtggagctggttaagcagcgcattgaggtcacggatggaaggctacaagcggcctttgtcgtgtcgcgggcgatcaaaggcacgcgcatcggcggtgaggttgccgaggcgctggccgggtacgagctgcccattcttgagtcccgtatcacgcagcgcgtgagctacccaggcactgccgccgccggcacaaccgttcttgaatcagaacccgagggcgacgctgcccgcgaggtccaggcgctggccgctgaaattaaatcaaaactcatttgagttaatgaggtaaagagaaaatgagcaaaagcacaaacacgctaagtgccggccgtccgagcgcacgcagcagcaaggctgcaacgttggccagcctggcagacacgccagccatgaagcgggtcaactttcagttgccggcggaggatcacaccaagctgaagatgtacgcggtacgccaaggcaagaccattaccgagctgctatctgaatacatcgcgcagctaccagagtaaatgagcaaatgaataaatgagtagatgaattttagcggctaaaggaggcggcatggaaaatcaagaacaaccaggcaccgacgccgtggaatgccccatgtgtggaggaacgggcggttggccaggcgtaagcggctgggttgtctgccggccctgcaatggcactggaacccccaagcccgaggaatcggcgtgacggtcgcaaaccatccggcccggtacaaatcggcgcggcgctgggtgatgacctggtggagaagttgaaggccgcgcaggccgcccagcggcaacgcatcgaggcagaagcacgccccggtgaatcgtggcaagcggccgctgatcgaatccgcaaagaatcccggcaaccgccggcagccggtgcgccgtcgattaggaagccgcccaagggcgacgagcaaccagattttttcgttccgatgctctatgacgtgggcacccgcgatagtcgcagcatcatggacgtggccgttttccgtctgtcgaagcgtgaccgacgagctggcgaggtgatccgctacgagcttccagacgggcacgtagaggtttccgcagggccggccggcatggccagtgtgtgggattacgacctggtactgatggcggtttcccatctaaccgaatccatgaaccgataccgggaagggaagggagacaagcccggccgcgtgttccgtccacacgttgcggacgtactcaagttctgccggcgagccgatggcggaaagcagaaagacgacctggtagaaacctgcattcggttaaacaccacgcacgttgccatgcagcgtacgaagaaggccaagaacggccgcctggtgacggtatccgagggtgaagccttgattagccgctacaagatcgtaaagagcgaaaccgggcggccggagtacatcgagatcgagctagctgattggatgtaccgcgagatcacagaaggcaagaacccggacgtgctgacggttcaccccgattactttttgatcgatcccggcatcggccgttttctctaccgcctggcacgccgcgccgcaggcaaggcagaagccagatggttgttcaagacgatctacgaacgcagtggcagcgccggagagttcaagaagttctgtttcaccgtgcgcaagctgatcgggtcaaatgacctgccggagtacgatttgaaggaggaggcggggcaggctggcccgatcctagtcatgcgctaccgcaacctgatcgagggcgaagcatccgccggttcctaatgtacggagcagatgctagggcaaattgccctagcaggggaaaaaggtcgaaaaggtctctttcctgtggatagcacgtacattgggaacccaaagccgtacattgggaaccggaacccgtacattgggaacccaaagccgtacattgggaaccggtcacacatgtaagtgactgatataaaagagaaaaaaggcgatttttccgcctaaaactctttaaaacttattaaaactcttaaaacccgcctggcctgtgcataactgtctggccagcgcacagccgaagagctgcaaaaagcgcctacccttcggtcgctgcgctccctacgccccgccgcttcgcgtcggcctatcgcggccgctggccgctcaaaaatggctggcctacggccaggcaatctaccagggcgcggacaagccgcgccgtcgccactcgaccgccggcgcccacatcaaggcaccctgcctcgcgcgtttcggtgatgacggtgaaaacctctgacacatgcagctcccggagacggtcacagcttgtctgtaagcggatgccgggagcagacaagcccgtcagggcgcgtcagcgggtgttggcgggtgtcggggcgcagccatgacccagtcacgtagcgatagcggagtgtatactggcttaactatgcggcatcagagcagattgtactgagagtgcaccatatgcggtgtgaaataccgcacagatgcgtaaggagaaaataccgcatcaggcgctcttccgcttcctcgctcactgactcgctgcgctcggtcgttcggctgcggcgagcggtatcagctcactcaaaggcggtaatacggttatccacagaatcaggggataacgcaggaaagaacatgtgagcaaaaggccagcaaaaggccaggaaccgtaaaaaggccgcgttgctggcgtttttccataggctccgcccccctgacgagcatcacaaaaatcgacgctcaagtcagaggtggcgaaacccgacaggactataaagataccaggcgtttccccctggaagctccctcgtgcgctctcctgttccgaccctgccgcttaccggatacctgtccgcctttctcccttcgggaagcgtggcgctttctcatagctcacgctgtaggtatctcagttcggtgtaggtcgttcgctccaagctgggctgtgtgcacgaaccccccgttcagcccgaccgctgcgccttatccggtaactatcgtcttgagtccaacccggtaagacacgacttatcgccactggcagcagccactggtaacaggattagcagagcgaggtatgtaggcggtgctacagagttcttgaagtggtggcctaactacggctacactagaaggacagtatttggtatctgcgctctgctgaagccagttaccttcggaaaaagagttggtagctcttgatccggcaaacaaaccaccgctggtagcggtggtttttttgtttgcaagcagcagattacgcgcagaaaaaaaggatctcaagaagatcctttgatcttttctacggggtctgacgctcagtggaacgaaaactcacgttaagggattttggtcatgcattctaggtactaaaacaattcatccagtaaaatataatattttattttctcccaatcaggcttgatccccagtaagtcaaaaaatagctcgacatactgttcttccccgatatcctccctgatcgaccggacgcagaaggcaatgtcataccacttgtccgccctgccgcttctcccaagatcaataaagccacttactttgccatctttcacaaagatgttgctgtctcccaggtcgccgtgggaaaagacaagttcctcttcgggcttttccgtctttaaaaaatcatacagctcgcgcggatctttaaatggagtgtcttcttcccagttttcgcaatccacatcggccagatcgttattcagtaagtaatccaattcggctaagcggctgtctaagctattcgtatagggacaatccgatatgtcgatggagtgaaagagcctgatgcactccgcatacagctcgataatcttttcagggctttgttcatcttcatactcttccgagcaaaggacgccatcggcctcactcatgagcagattgctccagccatcatgccgttcaaagtgcaggacctttggaacaggcagctttccttccagccatagcatcatgtccttttcccgttccacatcataggtggtccctttataccggctgtccgtcatttttaaatataggttttcattttctcccaccagcttatataccttagcaggagacattccttccgtatcttttacgcagcggtatttttcgatcagttttttcaattccggtgatattctcattttagccatttattatttccttcctcttttctacagtatttaaagataccccaagaagctaattataacaagacgaactccaattcactgttccttgcattctaaaaccttaaataccagaaaacagctttttcaaagttgttttcaaagttggcgtataacatagtatcgacggagccgattttgaaaccgcggtgatcacaggcagcaacgctctgtcatcgttacaatcaacatgctaccctccgcgagatcatccgtgtttcaaacccggcagcttagttgccgttcttccgaatagcatcggtaacatgagcaaagtctgccgccttacaacggctctcccgctgacgccgtcccggactgatgggctgcctgtatcgagtggtgattttgtgccgagctgccggtcggggagctgttggctggctggtggcaggatatattgtggtgtaaacaaattgacgcttagacaacttaataacacattgcggacgtttttaatgtactgaattaacgccgaattaagcttggacaatcagtaaattgaacggagaatattattcataaaaatacgatagtaacgggtgatatattcattagaatgaaccgaaaccggcggtaaggatctgagctacacatgctcaggttttttacaacgtgcacaacagaattgaaagcaaatatcatgcgatcataggcgtctcgcatatctcattaaagcagggcatgccggtcgagtcaaatctcggtgacgggcaggaccggacggggcggtaccggcaggctgaagtccagctgccagaaacccacgtcatgccagttcccgtgcttgaagccggccgcccgcagcatgccgcggggggcatatccgagcgcctcgtgcatgcgcacgctcgggtcgttgggcagcccgatgacagcgaccacgctcttgaagccctgtgcctccagggacttcagcaggtgggtgtagagcgtggagcccagtcccgtccgctggtggcggggggagacgtacacggtcgactcggccgtccagtcgtaggcgttgcgtgccttccaggggcccgcgtaggcgatgccggcgacctcgccgtccacctcggcgacgagccagggatagcgctcccgcagacggacgaggtcgtccgtccactcctgcggttcctgcggctcggtacggaagttgaccgtgcttgtctcgatgtagtggttgacgatggtgcagaccgccggcatgtccgcctcggtggcacggcggatgtcggccgggcgtcgttctgggctcatggtagactcgacggatccacgtgtggaagatatgaatttttttgagaaactagataagattaatgaatatcggtgttttggttttttcttgtggccgtctttgtttatattgagatttttcaaatcagtgcgcaagacgtgacgtaagtatccgagtcagtttttatttttctactaatttggtcgaagctttgggcggatcctctagattcgacggtatcgataagctcgcggatccctgaaagcgacgttggatgttaacatctacaaattgccttttcttatcgaccatgtacgtaagcgcttacgtttttggtggacccttgaggaaactggtagctgttgtgggcctgtggtctcaagatggatcattaatttccaccttcacctacgatggggggcatcgcaccggtgagtaatattgtacggctaagagcgaatttggcctgtaggatccctgaaagcgacgttggatgttaacatctacaaattgccttttcttatcgaccatgtacgtaagcgcttacgtttttggtggacccttgaggaaactggtagctgttgtgggcctgtggtctcaagatggatcattaatttccaccttcacctacgatggggggcatcgcaccggtgagtaatattgtacggctaagagcgaatttggcctgtaggatccctgaaagcgacgttggatgttaacatctacaaattgccttttcttatcgaccatgtacgtaagcgcttacgtttttggtggacccttgaggaaactggtagctgttgtgggcctgtggtctcaagatggatcattaatttccaccttcacctacgatggggggcatcgcaccggtgagtaatattgtacggctaagagcgaatttggcctgtaggatccgcgagctggtcaatcccattgcttttgaagcagctcaacattgatctctttctcgatcgagggagatttttcaaatcagtgcgcaagacgtgacgtaagtatccgagtcagtttttatttttctactaatttggtcgtttatttcggcgtgtaggacatggcaaccgggcctgaatttcgcgggtattctgtttctattccaactttttcttgatccgcagccattaacgacttttgaatagatacgctgacacgccaagcctcgctagtcaaaagtgtaccaaacaacgctttacagcaagaacggaatgcgcgtgacgctcgcggtgacgccatttcgccttttcagaaatggataaatagccttgcttcctattatatcttcccaaattaccaatacattacactagcatctgaatttcataaccaatctcgatacaccaaatcgaagatctccctggaattccagctgaccacccatggcaattcccggggatcagctcgaatttccccgatcgttcaaacatttggcaataaagtttcttaagattgaatcctgttgccggtcttgcgatgattatcatataatttctgttgaattacgttaagcatgtaataattaacatgtaatgcatgacgttatttatgagatgggtttttatgattagagtcccgcaattatacatttaatacgcgatagaaaacaaaatatagcgcgcaaactaggataaattatcgcgcgcggtgtcatctatgttactagatcgggaattggcatgcaagcttggcactggccgtcgttttacaacgtcgtgactgggaaaaccctggcgttacccaacttaatcgccttgcagcacatccccctttcgccagctggcgtaatagcgaagaggcccgcaccgatcgcccttcccaacagttgcgcagcctgaatggcgaatgctagagcagcttgagcttggatcagattgtcgtttcccgccttcagtttaaactatcagtgtttgacaggatatattggcgggtaaacctaagagaaaagagcgtttattagaataacggatatttaaaagggcgtgaaaaggtttatccgttcgtccatttgtatgtgcatgccaaccacagggttcccctcgggatcaaagt

SEQ ID NO: 959 - DNA, 419 bp, Spinacia oleracea
gcataaacttatcttcatagttgccactccaatttgctccttgaatctcctccacccaatacataatccactcctccatcacccacttcactactaaatcaaacttaactctgtttttctctctcctcctttcatttcttattcttccaatcatcgtactccgccatgaccaccgctgtcaccgccgctgtttctttcccctctaccaaaaccacctctctctccgcccgaagctcctccgtcatttcccctgacaaaatcagctacaaaaaggtgattcccaatttcactgtgttttttattaataatttgttattttgatgatgagatgattaatttgggtgctgcaggttcctttgtactacaggaatgtatctgcaactgggaaaatgggacccatcagggcccagatcgcctct

SEQ ID NO: 960 - protein, 62 aa, Acetabularia mediterranea
MASIMMNKSVVLSKECAKPLATPKVTLNKRGFATTIATKNREMMVWQPFNNKMFETFSFLPP

SEQ ID NO: 961 - protein, 85 aa, Arabidopsis thaliana
MAAAVSTVGAINRAPLSLNGSGSGAVSAPASTFLGKKVVTVSRFAQSNKKSNGSFKVLAVKEDKQTDGDRWRGLAYDTSDDQIDI

SEQ ID NO: 962 - protein, 54 aa, Arabidopsis thaliana
MKSSMLSSTAWTSPAQATMVAPFTGLKSSASFPVTRKANNDITSITSNGGRVSC

SEQ ID NO: 963 - protein, 91 aa, Arabidopsis thaliana
MAASGTSATFRASVSSAPSSSSQLTHLKSPFKAVKYTPLPSSRSKSSSFSVSCTIAKDPPVLMAAGSDPALWQRPDSFGRFGKFGGKYVPE

SEQ ID NO: 964 - protein, 80 aa, Brassica campestris
MSTTFCSSVCMQATSLAATTRISFQKPALVSTTNLSFNLRRSIPTRFSISCAAKPETVEKVSKIVKKQLSLKDDQKVVAE

SEQ ID NO: 965 - protein, 51 aa, Brassica napus
MATTFSASVSMQATSLATTTRISFQKPVLVSNHGRTNLSFNLSRTRLSISC

SEQ ID NO: 966 - protein, 44 aa, Chlamydomonas reinhardtii
MQALSSRVNIAAKPQRAQRLVVRAEEVKAAPKKEVGPKRGSLVK

SEQ ID NO: 967 - protein, 51 aa, Cucurbita moschata
MAELIQDKESAQSAATAAAASSGYERRNEPAHSRKFLEVRSEEELLSCIKK

SEQ ID NO: 968 - protein, 62 aa, Spinacea oleracea
MSTINGCLTSISPSRTQLKNTSTLRPTFIANSRVNPSSSVPPSLIRNQPVFAAPAPIITPTL

SEQ ID NO: 969 - protein, 75 aa, Spinacea oleracea
MTTAVTAAVSFPSTKTTSLSARCSSVISPDKISYKKVPLYYRNVSATGKMGPIRAQIASDVEAPPPAPAKVEKMS

SEQ ID NO: 970 - protein, 55 aa, Spinacea oleracea
MTTAVTAAVSFPSTKTTSLSARSSSVISPDKISYKKVPLYYRNVSATGKMGPIRA

SEQ ID NO: 971 - protein, 90 aa, Arabidopsis thaliana
MAASLQSTATFLQSAKIATAPSRGSSHLRSTQAVGKSFGLETSSARLTCSFQSDFKDFTGKCSDAVKIAGFALATSALVVSGASAEGAPK

SEQ ID NO: 972 - protein, 96 aa, Arabidopsis thaliana
MAQVSRICNGVQNPSLICNLSKSSQRKSPLSVSLKTQQHPRAYPISSSWGLKKSGMTLIGSELRPLKVMSSVSTAEKASEIVLQPIREISGLIKLP

SEQ ID NO: 973 - protein, 100 aa, Arabidopsis thaliana
MAAATTTTTTSSSISFSTKPSPSSSKSPLPISRFSLPFSLNPNKSSSSSRRRGIKSSSPSSISAVLNTTTNVTTTPSPTKPTKPETFISRFAPDQPRKGA

SEQ ID NO: 974 - protein, 46 aa, Arabidopsis thaliana
MITSSLTCSLQALKLSSPFAHGSTPLSSLSKPNSFPNHRMPALVPV

SEQ ID NO: 975 - protein, 93 aa, Arabidopsis thaliana
MASLLGTSSSAIWASPSLSSPSSKPSSSPICFRPGKLFGSKLNAGIQIRPKKNRSRYHVSVMNVATEINSTEQVVGKFDSKKSARPVYPFAAI

SEQ ID NO: 976 - protein, 52 aa, Arabidopsis thaliana
MASTALSSAIVGTSFIRRSPAPISLRSLPSANTQSLFGLKSGTARGGRVVAM

SEQ ID NO: 977 - protein, 39 aa, Arabidopsis thaliana
MAASTMALSSPAFAGKAVNLSPAASEVLGSGRVTNRKTV

SEQ ID NO: 978 - protein, 92 aa, Arabidopsis thaliana
MAAITSATVTIPSFTGLKLAVSSKPKTLSTISRSSSATRAPPKLALKSSLKDFGVIAVATAASIVLAGNAMAMEVLLGSDDGSLAFVPSEFT

SEQ ID NO: 979 - DNA, 10 bp, Artificial sequence
  Primer
ttgctcttcc

SEQ ID NO: 980 - DNA, 10 bp, Artificial sequence
  Primer
ttgctcttcg

SEQ ID NO: 981 - DNA, 27 bp, Artificial sequence
  Primer
atagaattcagaggcgatctgggccct

SEQ ID NO: 982 - DNA, 34 bp, Artificial sequence
  Primer
ataccatggaagagcaagaggcgatctgggccct

SEQ ID NO: 983 - DNA, 34 bp, Artificial sequence
  Primer
atagaattcgcataaacttatcttcatagttgcc

SEQ ID NO: 984 - DNA, 36 bp, Artificial sequence
  Primer
atagtttaaacgcataaacttatcttcatagttgcc

SEQ ID NO: 985 - DNA, 19 bp, Artificial sequence
  Primer
ggaattccagctgaccacc

SEQ ID NO: 986 - DNA, 20 bp, Artificial sequence
  Primer
gatccccgggaattgccatg

SEQ ID NO: 987 - DNA, 1059 bp, Saccharomyces cerevisiae
  CDS (1)..(1059)
atggcttcagaaaaagaaattaggagagagagattcttgaacgttttccctaaattagtagaggaattgaacgcatcgcttttggcttacggtatgcctaaggaagcatgtgactggtatgcccactcattgaactacaacactccaggcggtaagctaaatagaggtttgtccgttgtggacacgtatgctattctctccaacaagaccgttgaacaattggggcaagaagaatacgaaaaggttgccattctaggttggtgcattgagttgttgcaggcttacttcttggtcgccgatgatatgatggacaagtccattaccagaagaggccaaccatgttggtacaaggttcctgaagttggggaaattgccatcaatgacgcattcatgttagaggctgctatctacaagcttttgaaatctcacttcagaaacgaaaaatactacatagatatcaccgaattgttccatgaggtcaccttccaaaccgaattgggccaattgatggacttaatcactgcacctgaagacaaagtcgacttgagtaagttctccctaaagaagcactccttcatagttactttcaagactgcttactattctttctacttgcctgtcgcattggccatgtacgttgccggtatcacggatgaaaaggatttgaaacaagccagagatgtcttgattccattgggtgaatacttccaaattcaagatgactacttagactgcttcggtaccccagaacagatcggtaagatcggtacagatatccaagataacaaatgttcttgggtaatcaacaaggcattggaacttgcttccgcagaacaaagaaagactttagacgaaaattacggtaagaaggactcagtcgcagaagccaaatgcaaaaagattttcaatgacttgaaaattgaacagctataccacgaatatgaagagtctattgccaaggatttgaaggccaaaatttctcaggtcgatgagtctcgtggcttcaaagctgatgtcttaactgcgttcttgaacaaagtttacaagagaagcaaatag

SEQ ID NO: 988 - protein, 352 aa, Saccharomyces cerevisiae
MASEKEIRRERFLNVFPKLVEELNASLLAYGMPKEACDWYAHSLNYNTPGGKLNRGLSVVDTYAILSNKTVEQLGQEEYEKVAILGWCIELLQAYFLVADDMMDKSITRRGQPCWYKVPEVGEIAINDAFMLEAAIYKLLKSHFRNEKYYIDITELFHEVTFQTELGQLMDLITAPEDKVDLSKFSLKKHSFIVTFKTAYYSFYLPVALAMYVAGITDEKDLKQARDVLIPLGEYFQIQDDYLDCFGTPEQIGKIGTDIQDNKCSWVINKALELASAEQRKTLDENYGKKDSVAEAKCKKIFNDLKIEQLYHEYEESIAKDLKAKISQVDESRGFKADVLTAFLNKVYKRSK

SEQ ID NO: 989 - DNA, 1079 bp, Oryza sativa
  CDS (2)..(925)
catgctggactacaacgtgcttggtggaaaattgaaccgtggcttggctgttgttgagagctacaaaatactgaaagctgctagcgcaacagaaccgagcgaggaggaattgtttcttgcatgcatccttggttggggcatcgaatggcttcaggcctattttctggttcttgatgatataatggataactcacaaactcgacgaggaaaaccctgttggtttaggcttcccaaggtcggcctcatagctataaatgatggactcgtccttcgcagcaaaatttcaaggatctttaggcgctattttcgtggaaaaagttactatgttgatctcctagatttattcaatgaggttgaaattcagacaacttcaggccagttattagatcaaattacaacaaatgaaggaaggaaagatctgaacaagtataatgtacatgtatataggcgcattgtggaatataagacagcttactattcattttatttgccggttgcatgcgcactgctgttgtttggtgagagtttggacaattatgctcaagtgaagcatatcctagttgagatgggtgtttactttcaaagccaggatgattatctggactgttttggtgaaccagaaattattggcaagataggaagtgacattgaagatttcaagtgttcttggctatttgttcaagcacttgagcgcgctgatgagaaacaaaaaggagtcttgtttgaaaattatgggaaatcagatccagcttgtgttgccaaagtgaaggatctatataacgaacttcatctccagcgggtgttttctgagtatgaaagggagagctatgaaaagctgatctcagccatcgaagcacaaccgaatgaagcagtacgagcggttctgaaatcttttctgcacaagatctacaagaggagcaagtagaacacggctgaaaaataaggccaattttggcatctcgtggattattctggttcttggcttcttgttgggatgtatagcataggtgtgataggtttctaacttctgggactttgcaacgaggaacgtgcctgataaataagaaaaatagtttccc

SEQ ID NO: 990 - protein, 307 aa, Oryza sativa
MLDYNVLGGKLNRGLAVVESYKILKAASATEPSEEELFLACILGWGIEWLQAYFLVLDDIMDNSQTRRGKPCWFRLPKVGLIAINDGLVLRSKISRIFRRYFRGKSYYVDLLDLFNEVEIQTTSGQLLDQITTNEGRKDLNKYNVHVYRRIVEYKTAYYSFYLPVACALLLFGESLDNYAQVKHILVEMGVYFQSQDDYLDCFGEPEIIGKIGSDIEDFKCSWLFVQALERADEKQKGVLFENYGKSDPACVAKVKDLYNELHLQRVFSEYERESYEKLISAIEAQPNEAVRAVLKSFLHKIYKRSK

SEQ ID NO: 991 - DNA, 1079 bp, Oryza sativa; identical to SEQ ID NO: 989
  CDS (2)..(925)

SEQ ID NO: 992 - protein, 307 aa, Oryza sativa; identical to SEQ ID NO: 990

SEQ ID NO: 993 - DNA, 1594 bp, Zea mays
  Zea mays subsp. mays
  CDS (448)..(1365)
agatctggatccaaacggcggctctgtttcgtgcgctgtcccgtctccctccgtctcgtcagcttcgtgccgtgcccgtgcgagccgctgccaacccgctccagctttgcccgttgccttggccgtcccgtccggccgtccctagaaaaggccgcgtcccacgttgccttggttcccccaccctgctgtctccctccctccttccttccttccccgccactgcgcagcgcgagtgcggcgacagccagtcacacactcacactccctcgaccgctctcggccccgtccgcgtcgccgcagggcgaggaggcaatggcggcaggcgggaatggcgccggcggggacaccagggcggccttcgcgcggatctacaagacgctcaaggaggagctgctcaccgacccggccttcgagttcaccgaggagtcacgccagtggatcgaccgcatggttgactacaatgtactcggaggcaagtgtaaccgtgggctctctgtggtcgacagctacaagctgctcaagggcgctgatgctctgggcgaggaggaaacgttccttgcttgcaccctcggctggtgcattgaatggcttcaggctttctttcttgtgcttgatgatatcatggatgactctcacactcgtcgcggccagccttgctggttcagggtgcctcaggttggcttaattgctgcgaatgacgggatcatccttcgcaaccatatctcacggatccttcggcgccactttaagggcaaaccttactatgctgatctccttgatttgttcaatgaggttgagttcaagacagcttcaggtcagctgctggaccttatcactacccatgagggagaaaaagatctaacaaagtataacataacagttcacggtcgaattgttcaatacaagacagcctattattcattttatctgccggttgcatgtgccctgctgctctctggcgagaatttggacaattatggtgatgtagagaacatccttgttgaaatgggaacatactttcaagtccaggatgactatctggattgttacggtgatcctgaatttatcggcaagattggaacggacattgaagattacaagtgctcatggctagttgtgcaagcccttgagcgtgctgatgagagccaaaagcgcattctatttgaaaattatggcaagaaagatccagcctgtgtggcaaaagtgaagaacctctacaaagaacttgacctagaggcggtatttcaggagtacgagaatgagagctacaagaagctgattgcagacattgaagcccagccaagcattgcggttcagaaagtgctgaaatccttcttgcacaagatctacaagaggcagaagtagggtgctcttggataaacgagctcaggagtcgttactccttcgcatgcttgacataaccggacttcctcacctggttgctctagtatgatgtggagcgtctagttaaaaaaatcgatgtagtatgaagcaccttgctgctctgaatattaacaggcaattaaggcaaggtgctgtttcggtttggtggaccgcatgttgcagataataaattagttgttttgtcatgcgg

SEQ ID NO: 994 - protein, 305 aa, Zea mays
  Zea mays subsp. mays
MVDYNVLGGKCNRGLSVVDSYKLLKGADALGEEETFLACTLGWCIEWLQAFFLVLDDIMDDSHTRRGQPCWFRVPQVGLIAANDGIILRNHISRILRRHFKGKPYYADLLDLFNEVEFKTASGQLLDLITTHEGEKDLTKYNITVHGRIVQYKTAYYSFYLPVACALLLSGENLDNYGDVENILVEMGTYFQVQDDYLDCYGDPEFIGKIGTDIEDYKCSWLVVQALERADESQKRILFENYGKKDPACVAKVKNLYKELDLEAVFQEYENESYKKLIADIEAQPSIAVQKVLKSFLHKIYKRQK

SEQ ID NO: 995 - DNA, 1393 bp, Triticum aestivum
  CDS (135)..(1199)
acacaaaattccgttcagcgcgtgcagtagagagctccccgcttctcctcatcctcctccccaactccaatactctccacagaaatctccgctccttctcgtcccctctcgctcgcgtgcgcgtgaggtgcgcaatggcggcggcggcggtggcgttgtcgaacggctccggtggcgactccaaggccgagttcgcggaaatatacagcaggctcaaggaggagatgctcgaggaccccgccttcgagttcaccgacgagtcgctccagtggatcgaccgcatgctggattacaatgtcctaggaggaaagtgcaaccgtgggctctctgtcatcgatagctacaagacattgaaaggtgtagatgttttgaggaaggaggagacatttcttgcctgcacccttggttggtgtattgaatggcttcaagcatattttcttgtgcttgatgatatcatggacaactcccagacacgacggggccagccttgctggtttagggtgcctcaggttggccttattgctgtaaacgatgggattatccttcgcaaccatatttcacggatccttcaacgccacttcagaggaaaaccgtattatgttgatctcattgatttgttcaatgaggttgaattcaagacagcttcagggcagttgttggatcttatcactactcacgagggagaaaaggatctcacaaaatataacttgaatgttcaccggcgcattgtgcaatacaagacagcgtactattcattttatcttccggttgcatgtgcattgctgctgtcgggtgagaatttggataacttcggcgatgtaaagaacattcttgttgaaatgggaacatactttcaagttcaggatgattatctagattgttttggagatcctgaatctattggcaagattggaactgacattgaagactacaagtgttcctggttagttgtgcaagctcttgagcatgcagatgagagccaaaagggcattctacttgaaaattatgggaagtcagatccagagtctgttgcaaaagtgaaggatctgtataaagaacttgatctggagacggcatttcacaagtatgagcgggagagctacaataagctgatcgccgacatcgaggcccagccaagcaaagctgttcagaaagttttgatgtctttcctggagaagatctacaagaggcagaagtagagctaagctcttggagaggttgttgtgcctttccgtgctttggtaacttattccatgttctgtgtgtgttggtcttattaccataatgtacagcgtgttattccttccaacaataaactacggtgctattttttagtggtgcgtgaacctgctgtgccataaccatgttatttgaagctctctaatgtttttct

SEQ ID NO: 996 - protein, 354 aa, Triticum aestivum
MAAAAVALSNGSGGDSKAEFAEIYSRLKEEMLEDPAFEFTDESLQWIDRMLDYNVLGGKCNRGLSVIDSYKTLKGVDVLRKEETFLACTLGWCIEWLQAYFLVLDDIMDNSQTRRGQPCWFRVPQVGLIAVNDGIILRNHISRILQRHFRGKPYYVDLIDLFNEVEFKTASGQLLDLITTHEGEKDLTKYNLNVHRRIVQYKTAYYSFYLPVACALLLSGENLDNFGDVKNILVEMGTYFQVQDDYLDCFGDPESIGKIGTDIEDYKCSWLVVQALEHADESQKGILLENYGKSDPESVAKVKDLYKELDLETAFHKYERESYNKLIADIEAQPSKAVQKVLMSFLEKIYKRQK

SEQ ID NO: 997 - DNA, 1393 bp, Triticum aestivum; identical to SEQ ID NO: 995
  CDS (225)..(1199)

SEQ ID NO: 998 - protein, 324 aa, Triticum aestivum
MLEDPAFEFTDESLQWIDRMLDYNVLGGKCNRGLSVIDSYKTLKGVDVLRKEETFLACTLGWCIEWLQAYFLVLDDIMDNSQTRRGQPCWFRVPQVGLIAVNDGIILRNHISRILQRHFRGKPYYVDLIDLFNEVEFKTASGQLLDLITTHEGEKDLTKYNLNVHRRIVQYKTAYYSFYLPVACALLLSGENLDNFGDVKNILVEMGTYFQVQDDYLDCFGDPESIGKIGTDIEDYKCSWLVVQALEHADESQKGILLENYGKSDPESVAKVKDLYKELDLETAFHKYERESYNKLIADIEAQPSKAVQKVLMSFLEKIYKRQK

SEQ ID NO: 999 - DNA, 1500 bp, Triticum aestivum
  CDS (245)..(1297)
atatatattaatactggcagccgctgccagtgctccgagctcgacgccatcgcgatctccctccagtctcccctccgcccatcacccgtcgccgtcgcagccccgcccctaaaatactcccgcgcccctcctagccgccacccgccatccgtcccccgaaaatctcccagcgcagccgaactgaggtcacccgccctccccctcggccgatttactcctcggcttccctcccctgtttgaggcaatggcggcggcggagaacggcgggggcggggagagcaaggcggcgttcgcgcggatctacgacgcgctcaaggcggagctgctccgggaccccgccttcgagtacacggagtcgtcgcacgagtggatcgaccgcatgctggactacaatgtactgggaggaaagtgcaaccgtgggctctccgtggtcgatagctataagctgttgaaaggtgtcgatgttcttagtgaggaggagatgtttcttgcctccactctcggttggtgcattgaatggctccaagccttctttcttgtgcttgatgatatcatggacgactcccacactcgacgtgggcagccttgttggtttagggtgtctcgggttggcttgattgctgtaaatgatgggattctccttcgcaaccatatttcgagaatgcttcggctccactttaagaagaagccttactatgccgatctccttgatttattcaacgaggttgagttcaagacagcttctggtcaaatgctggatcttattacaacccacgagggagaaaaagatctaacaaaatataacattggagtccaccgccgaattgttcaattcaagacagcctactattcattttatctgccggttgcatgtgcgctgctactctctggtgagagtttggagaactacggtgctgtagagaacatacttgtcgagatgggaacttacttccaagttcaggatgattatctagactgttatggtgatcctgaatttattggcaagattggcaccgacattgaagattacaagtgctcctggctagttgtccaagctcttgagcgtgctgatgagagccaaaagagcattctatttgaaaactatggaaagaaagatccagcatgcgtggcaaaagtgaaggatctctacaaagaacttgaccttgaggcggtatttcatgagtacgagagcgagagctacaagaagctgattgctggtatcgaagcccagccgagcgacgctgttcagaaggttctgaagtccttcttgcacaagatctacaagaggcagaagtagggtgtctcttgggcaggaaatctgctccattgtcgcatgtttgatagatgactagtggtgttgattttatggtttagtgcttcatgttgtatgttgcgccttgctgctcccagtagtaataatgatgcaaggcgctatttcgggtttaatggaccgccttggtgtagacgactgatggttctgtaatttgcaccttgcccttt

SEQ ID NO: 1000 - protein, 350 aa, Triticum aestivum
MAAAENGGGGESKAAFARIYDALKAELLRDPAFEYTESSHEWIDRMLDYNVLGGKCNRGLSVVDSYKLLKGVDVLSEEEMFLASTLGWCIEWLQAFFLVLDDIMDDSHTRRGQPCWFRVSRVGLIAVNDGILLRNHISRMLRLHFKKKPYYADLLDLFNEVEFKTASGQMLDLITTHEGEKDLTKYNIGVHRRIVQFKTAYYSFYLPVACALLLSGESLENYGAVENILVEMGTYFQVQDDYLDCYGDPEFIGKIGTDIEDYKCSWLVVQALERADESQKSILFENYGKKDPACVAKVKDLYKELDLEAVFHEYESESYKKLIAGIEAQPSDAVQKVLKSFLHKIYKRQK

SEQ ID NO: 1001 - DNA, 1500 bp, Triticum aestivum; identical to SEQ ID NO: 999
  CDS (380)..(1297)

SEQ ID NO: 1002 - protein, 305 aa, Triticum aestivum
MLDYNVLGGKCNRGLSVVDSYKLLKGVDVLSEEEMFLASTLGWCIEWLQAFFLVLDDIMDDSHTRRGQPCWFRVSRVGLIAVNDGILLRNHISRMLRLHFKKKPYYADLLDLFNEVEFKTASGQMLDLITTHEGEKDLTKYNIGVHRRIVQFKTAYYSFYLPVACALLLSGESLENYGAVENILVEMGTYFQVQDDYLDCYGDPEFIGKIGTDIEDYKCSWLVVQALERADESQKSILFENYGKKDPACVAKVKDLYKELDLEAVFHEYESESYKKLIAGIEAQPSDAVQKVLKSFLHKIYKRQK

SEQ ID NO: 1003 - DNA, 1331 bp, Helianthus annuus
  CDS (1)..(1026)
atggcctctgatctcaagtctaaattcctccacgtttatcaaactctcaaatccgaattactcaacgatccagccttcgaattccaccacgattctcgtcaatggatcgataagatgcttgactacaacgtacccggaggaaagctgaatcggggcctctctgttgttgacagctaccagttacttaaaggagcagaactgactgatgatgagatttttcttgcatctgcccttggttggtgcattgaatggcttcaagcatactttcttgtgcttgatgacatcatggacgggtctcatacacgcagaggtcaaccctgttggttcagattacccaaggttggtatgattgctgcaaacgatggattgattcttcgcaaccatgtcccaagaattctcaaaaagcattttcgaggaaagccgtattatgtggatctagttgacctattcaacgaggtagaattccaaacagcctctggacagatgattgatttgatcactacacttgttggagaaaaagatctctcaaagtattcattgtctattcatcgccggattgttcagtacaaaaccgcttattactcattttaccttcctgttgcttgtgcgctccttatgttcggtgaggatttggacaatcatgttgaagtgaagaatgtacttgtagaaatgggtacctattttcaagtgcaggacgattatctagactgttttggtgctcccgaggtaattggaaagattggaacagacattgaagactttagttcatggctagttgtaaaagctttggaacttgccaatgaggaacaaaagaaagtcctacatgaaaattatggaaaaaaagacccctcttcggttgcaaaagtgaaggaactatacaacactctaaatcttcagggcgtatttgaagattatgagagccacagttacaagaagctaatcacgtccattgaaggtcacccaagcaaagccgtacaagcagtgttgaaatcgttcttgggaaagatatacaagaggcaaaagtaggtaatttatcctaccaaataatttttttgtgtttttactatgtgtaataagatttctacattgtttgtaacaactgttttgtagtttctggattcgtcgtttttaatgttctttattgacaatttttttgagttatttgttggattacgagtaggtcgaaattttgtaatatcaattgggctagatggttagactttaacattcgtgacgctattttgtaatctttcgggttccagcttcttgctggcccagtttctatatcttgttatatagaagtttcgccgttcaaaaaaaaaaaaaaaaaa

SEQ ID NO: 1004 - protein, 341 aa, Helianthus annuus
MASDLKSKFLHVYQTLKSELLNDPAFEFHHDSRQWIDKMLDYNVPGGKLNRGLSVVDSYQLLKGAELTDDEIFLASALGWCIEWLQAYFLVLDDIMDGSHTRRGQPCWFRLPKVGMIAANDGLILRNHVPRILKKHFRGKPYYVDLVDLFNEVEFQTASGQMIDLITTLVGEKDLSKYSLSIHRRIVQYKTAYYSFYLPVACALLMFGEDLDNHVEVKNVLVEMGTYFQVQDDYLDCFGAPEVIGKIGTDIEDFSSWLVVKALELANEEQKKVLHENYGKKDPSSVAKVKELYNTLNLQGVFEDYESHSYKKLITSIEGHPSKAVQAVLKSFLGKIYKRQK

SEQ ID NO: 1005 - DNA, 1044 bp, Aspergillus fumigatus
  CDS (1)..(1044)
atggcaactaccaccagtcgtgcagcctttgaggctgttttccccacattggccgaagatctcctggcccatgctaagaaatataatctgcccgagaatgcagtaaagtggttcgaacaggtcctcaatgtcaacgttcccggtggaaagctcaaccgcggcctctcggttccagataccggcatcgctctactgcagaagcccctgaccgacgagcagttcaagcatctcagcatcctgggttggttgaccgagctgctccaggctttcttcttggtcagcgatgacatgatggacagctcgattactcgtcgtggccagccgtgctggtaccgccaccctggagttgggctgatcgctatcaacgacgcattcatgcttgaatccggcatctacgtgatcctcaagaagcacttccgctctcatcctgcctacgtcgatttccttgagctgttccatgagaccacctggcagacggaactcggtcaactgtgcgatttgattacggcccctgaggacaaggttgatctggacaacttctccatggagaagtacatgttcatcgtgacctacaaaaccgcttactacagtttctaccttcccgttgctcttgctttgctctacctcgaactcgccacccccgagaaccttcaacagacccacgacatcctgatcccgctgggtcagtacttccaggtgcaggacgactacttggacgcctatggtgatccagccgtcattggcaagatcggcaccgatatccaggacaacaagtgctcatggctgatcaaccaagctcttcagcgctgcaacactgagcagcgcaagctcctcgacaccgcctacggccgcaaggacagcgagcttgaggccaaggtcaaggcgttgtacaaggaactcgacttggagaaggtctacaaggagtacgaggagaagaccgttggtgaaattcgcagcaagattgcagccattgacgaaagtcagggcctgaagaaagaggtcttcgaggcattccttggcaagatctacaagcgcaccaaatag

SEQ ID NO: 1006 - protein, 347 aa, Aspergillus fumigatus
MATTTSRAAFEAVFPTLAEDLLAHAKKYNLPENAVKWFEQVLNVNVPGGKLNRGLSVPDTGIALLQKPLTDEQFKHLSILGWLTELLQAFFLVSDDMMDSSITRRGQPCWYRHPGVGLIAINDAFMLESGIYVILKKHFRSHPAYVDFLELFHETTWQTELGQLCDLITAPEDKVDLDNFSMEKYMFIVTYKTAYYSFYLPVALALLYLELATPENLQQTHDILIPLGQYFQVQDDYLDAYGDPAVIGKIGTDIQDNKCSWLINQALQRCNTEQRKLLDTAYGRKDSELEAKVKALYKELDLEKVYKEYEEKTVGEIRSKIAAIDESQGLKKEVFEAFLGKIYKRTK

SEQ ID NO: 1007 - DNA, 1044 bp, Aspergillus fumigatus; identical to SEQ ID NO: 1005
  CDS (1)..(1044)

SEQ ID NO: 1008 - protein, 347 aa, Aspergillus fumigatus; identical to SEQ ID NO: 1006

SEQ ID NO: 1009 - DNA, 1056 bp, Candida albicans
  CDS (1)..(1056): transl_table=12
atgtctgataaacttgctgctagagaaagatttcttgatgtttttgaagatttagttgaagaattgaaacaaattttagtttcttataatatgcctcaagaagccattgaatggtttgttagaagtttaaattataatactccaggaggtaaattaaatcgaggattatctgtagttgatacatttgccattttgaataatactactagtgataaattaaatgatactgaatataaaaaagttgcattattaggttgggccattgaattattacaagcatattttttagttgctgatgatatgatggatcaatctaaaactagaagaggtcaaccatgttggtatttagttgaaggagttaacaacattgctattaatgattcatttatgttagaaggggccatttatatcttgttgaaaaaacatttccgtcaagatccttactatgttgatttattagatttatttcatgaagtcactttccaaactgaattaggtcaattattagatttaattactgctgatgaagaaattgttgatttagataaattttctttggaaaaacattcatttattgttattttcaaaactgcttattattcattttatttacccgtggcattagcaatgtatatgagtggtattaatgatgaaaaagatttaaaacaagttagagacattttgattcccttgggagaatatttccaaattcaagatgattatttggattgttttggtactccagaacaaattgggaaaatcggtactgatattaaagataataaatgttcttgggttattaatcaagctttattgattgctacccctgaacaacgtcaattattagataataattatggtaaaaaagatgatgaatcagaacaaaaatgtaaagatttatttaaacaattgggtattgaaaaaatttatcatgattatgaagaatcaattgttgctaaattaagaaaacaaattgatcaaattgatgaatctagaggtttaaagaaagatgttttaactgctttcttaggtaaagtttataaaagatctaaatag

SEQ ID NO: 1010 - protein, 351 aa, Candida albicans
MSDKLAARERFLDVFEDLVEELKQILVSYNMPQEAIEWFVRSLNYNTPGGKLNRGLSVVDTFAILNNTTSDKLNDTEYKKVALLGWAIELLQAYFLVADDMMDQSKTRRGQPCWYLVEGVNNIAINDSFMLEGAIYILLKKHFRQDPYYVDLLDLFHEVTFQTELGQLLDLITADEEIVDLDKFSLEKHSFIVIFKTAYYSFYLPVALAMYMSGINDEKDLKQVRDILIPLGEYFQIQDDYLDCFGTPEQIGKIGTDIKDNKCSWVINQALLIATPEQRQLLDNNYGKKDDESEQKCKDLFKQLGIEKIYHDYEESIVAKLRKQIDQIDESRGLKKDVLTAFLGKVYKRSK

SEQ ID NO: 1011 - DNA, 975 bp, Cryptococcus neoformans
  CDS (1)..(975)
atgtcctcgctcaaccccgaaattgacggccattcctacaaccgcccggacgctggagctcagactcccgttgacgccaaggctgcgcgaagggcccgtttcgaaaaggtctttgaccagattgccgaggagcttttgacgtatgtcaagggtgagggtatgcccaaggatgctgtagagtggtaccaaaaggtactttaccacaacactcccggtggcaagctcaaccgtggtatgtccgtcgtcgacactgtcgaaatcctcaagggccgagaactatctgaggaagaatacaccaatgccgctatccttggatggtgtgtagagctcctccaagcttatttccttgtcgccgatgacattatggaccagagcgttacccgtcgaggacagccctgttggtaccgagtgcctaacgtcggtaacattgctattaacgacgctttcatgcttgaagccgccatctattacctcctcaagaaacacttcaggagccaaaagtactatgtcgacttgatggaactcttcctagagactaccttccaaactgagctcggccagttggtcgacctcattaccgcgcctgaagaccacgtcgacttgaacaaattctctctcgagaagcaccacctcattgtcgtttacaagactgctttctactctttctacctccccgtcgctcttgccatgcacatgtccggtgttgaggacaaggctgctttcgatctcgccctcaaaatccttctccccctcggcgagtacttccaggttcaggacgactatctcgattgctacggcaagcccgagcacattggcaagattggtactgatatcctcgacaacaagtgctcttggaacgtcaacaccgccctcgctcacgctacccctgaacagcgtaagatcctagagacgcttttgacaaatacttaccgacaatatatctttccatcaagtggaaaccattcagttggttga

SEQ ID NO: 1012 - protein, 324 aa, Cryptococcus neoformans
MSSLNPEIDGHSYNRPDAGAQTPVDAKAARRARFEKVFDQIAEELLTYVKGEGMPKDAVEWYQKVLYHNTPGGKLNRGMSVVDTVEILKGRELSEEEYTNAAILGWCVELLQAYFLVADDIMDQSVTRRGQPCWYRVPNVGNIAINDAFMLEAAIYYLLKKHFRSQKYYVDLMELFLETTFQTELGQLVDLITAPEDHVDLNKFSLEKHHLIVVYKTAFYSFYLPVALAMHMSGVEDKAAFDLALKILLPLGEYFQVQDDYLDCYGKPEHIGKIGTDILDNKCSWNVNTALAHATPEQRKILETLLTNTYRQYIFPSSGNHSVG

SEQ ID NO: 1013 - DNA, 975 bp, Cryptococcus neoformans; identical to SEQ ID NO: 1011
  CDS (1)..(975)

SEQ ID NO: 1014 - protein, 324 aa, Cryptococcus neoformans; identical to SEQ ID NO: 1012

SEQ ID NO: 1015 - DNA, 1569 bp, Zea mays
  CDS (313)..(1380)
attcggctcgagctagagttaaaaaaacacttacagcacgcagttgtcgtcgtcattgtcttcgactcttcgtggcacctcccgtccataaaaataaacgtgtgcccacaaatctgttcgctcgcattggcaactgaaccgcaccaggcaccacagtcccgtgcggcagtggcagacgcacagcagatcagcagcgcctccctctgcggctctgcctcttgccaaagccccccacagaattcttctccctccccgtctcctctcgcgctcgcgcgtggtgaggtgaggtggagttccgaccccgaggccgcaatggcgacagcggaggtggtggtggccaacggctcgggcggcgccgacaccaagaccgcgtttaaggagatatacagcaagctcaagcaggagatgctcgaggaccccgccttcgaattcactgacgagtcgctccagtggatcgaccgcatgttggattacaatgtgcttggaggaaagtgcaatcgtgggctatctgttgtcgatagctacaagattttgaagggtgttgacgttctgagcaaggaggagacatttctggcctgcacccttggctggtgtattgaatggcttcaagcttattttcttgtgcttgatgatattatggacaactcccagacacggcgtggccagccttgctggtttagagtgccacaggttggtctcattgcagtaaatgatgggattatccttcgcaatcatatctcacgaatccttcaacgccacttcaaaggaaagccatattatgttgatatcattgacttgttcaacgaggttgagttcaagacagcttcagggcaaatgttggatcttatcactacccacgagggtgaaaaggatctaactaaatataacttgacagttcaccgccgcatcgttcagtacaagacagcttattattcattctaccttcctgttgcatgtgcattgctgctggctggtgagaacttggaaaactttgttgatgtaaagaacattctcgttgaaatgggaacatactttcaagttcaggatgactatctagattgttttggtgatcctgaattcattggcaagatcggaactgacattgaagactacaaatgttcctggctagttgtgcaagctcttgagcgtgctgctgagaaccaaaagagcattctgtttgaaaattacggaaagtctgatccagcgtgtgttgcaaaggtgaaggacttgtacaaagagcttaaactggaggaggttttccatgagtacgagagggagagttacaacaagctgattgccgacatcgaggcccagccgagcaaggcagtccaaactgttttgaagtccttccttcacaagatctacaagagggacaagtagacccagatcgtcgacaagctgctccatcgacgcttgcatcaatcgaattactatacttgattgatgcggacgagtaatttgtactatgttgttttgtgttttcattctcctgttgtacggtacaccttaatataataaagcacagtggtactagggatgcaaaaaaaaaaaaaaaaaaaaaaaaaaagg

SEQ ID NO: 1016 - protein, 355 aa, Zea mays
MATAEVVVANGSGGADTKTAFKEIYSKLKQEMLEDPAFEFTDESLQWIDRMLDYNVLGGKCNRGLSVVDSYKILKGVDVLSKEETFLACTLGWCIEWLQAYFLVLDDIMDNSQTRRGQPCWFRVPQVGLIAVNDGIILRNHISRILQRHFKGKPYYVDIIDLFNEVEFKTASGQMLDLITTHEGEKDLTKYNLTVHRRIVQYKTAYYSFYLPVACALLLAGENLENFVDVKNILVEMGTYFQVQDDYLDCFGDPEFIGKIGTDIEDYKCSWLVVQALERAAENQKSILFENYGKSDPACVAKVKDLYKELKLEEVFHEYERESYNKLIADIEAQPSKAVQTVLKSFLHKIYKRDK

SEQ ID NO: 1017 - DNA, 1029 bp, Medicago truncatula
  CDS (1)..(1029)
atggcagatctcaagtccacattcttgaatgtctactctgttctcaaatctgagcttctccatgaccctgctttcgagtggtctgaggattctcgtcaatgggttgataggatgctggactacaatgtgcctggaggaaagctgaaccgtggactgtcagttattgacagctaccgattgttaaaagaaggacaggcattgaatgatgacgaaattttccaagctagcgctcttggttggtgtattgaatggcttcaggcatattttcttgttcttgacgacattatggataactcccatacacgtcgtggtcagccatgctggtatagagtacccaaggttggaatgattgctgcgaatgatggagttctactaagaaaccatattccgcgtatccttaggaaacacttcaagggaaagccgtattatgttgaacttcttgatttgttcaatgaggttgagtttcaaactgctgcaggacagatgatcgatttgatcaccacactggaaggagaaaaagacctgtccaaatacaccttatcactgcaccggcgtattgttcagtacaagactgcctattattcattttaccttccagttgcatgtgcattgctaatggctggtgaaaatttggataaccatgttgatgtgaagaacattcttgttgagatgggaacatattttcaagttcaggatgattatttggattgctttggtgatcctgaaacaattggaaagataggcacagatattgaagactttaagtgctcttgggtagttgtgaaagcactggaactttgcaatgaagaacaaaagaaggttttacatgagaactatgggaagccagatccagcaaatgttgctatagtcaaaaccctttacaatgagcttaatctcgagggtgtatttgaggagtatgagagtacgagctatgagaagcttgtaacctctattgaagctcatcccagcaatgcagttcaagcagtattgaaatccttcttggctaaaatttacaagaggcaaaagtaa

SEQ ID NO: 1018 - protein, 342 aa, Medicago truncatula
MADLKSTFLNVYSVLKSELLHDPAFEWSEDSRQWVDRMLDYNVPGGKLNRGLSVIDSYRLLKEGQALNDDEIFQASALGWCIEWLQAYFLVLDDIMDNSHTRRGQPCWYRVPKVGMIAANDGVLLRNHIPRILRKHFKGKPYYVELLDLFNEVEFQTAAGQMIDLITTLEGEKDLSKYTLSLHRRIVQYKTAYYSFYLPVACALLMAGENLDNHVDVKNILVEMGTYFQVQDDYLDCFGDPETIGKIGTDIEDFKCSWVVVKALELCNEEQKKVLHENYGKPDPANVAIVKTLYNELNLEGVFEEYESTSYEKLVTSIEAHPSNAVQAVLKSFLAKIYKRQK

SEQ ID NO: 1019 - DNA, 924 bp, Oryza sativa
  Oryza sativa (japonica cultivar-group)
  CDS (1)..(924)
atgctggactacaacgtgcttggtggaaaattgaaccgtggcttggctgttgttgagagctacaaaatactgaaagctgctagcgcaacagaaccgagcgaggaggaattgtttcttgcatgcatccttggttggggcatcgaatggcttcaggcctattttctggttcttgatgatataatggataactcacaaactcgacgaggaaaaccctgttggtttaggcttcccaaggtcggcctcatagctataaatgatggactcgtccttcgcagccaaatttcaaggatctttaggcgctattttcgtggaaaaagttactatgttgatctcctagatttattcaatgaggttgaaattcagacaacttcaggccagttattagatcaaattacaacaaatgaaggaaggaaagatctgaacaagtataatgtacatgtatataggcgcattgtggaatataagacagcttactattcattttatttgccggttgcatgcgcactgctgttgtttgatgagagtttggacaattatgctcaagtgaagcatatcctagttgagatgggtgtttactttcaaagccaggatgattatctggactgttttggtgaaccagaaattattggcaagataggaagtgacattgaagatttcaagtgttcttggctatttgttcaagcacttgagcgcgctgatgagaaacaaaaaggagtcttgtttgaaaattatgggaaatcagatccagcttgtgttgccaaagtgaaggatctatataacgaacttcatctccagcgggtgttttctgagtatgaaagggagagctatgaaaagctgatctcagccatcgaagcacaaccgaatgaagcagtacgagcggttctgaaatcttttctgcacaagatctacaagaggagcaagtag

SEQ ID NO: 1020 - protein, 307 aa, Oryza sativa
  Oryza sativa (japonica cultivar-group)
MLDYNVLGGKLNRGLAVVESYKILKAASATEPSEEELFLACILGWGIEWLQAYFLVLDDIMDNSQTRRGKPCWFRLPKVGLIAINDGLVLRSQISRIFRRYFRGKSYYVDLLDLFNEVEIQTTSGQLLDQITTNEGRKDLNKYNVHVYRRIVEYKTAYYSFYLPVACALLLFDESLDNYAQVKHILVEMGVYFQSQDDYLDCFGEPEIIGKIGSDIEDFKCSWLFVQALERADEKQKGVLFENYGKSDPACVAKVKDLYNELHLQRVFSEYERESYEKLISAIEAQPNEAVRAVLKSFLHKIYKRSK

SEQ ID NO: 1021 - DNA, 1179 bp, Oryza sativa
  Oryza sativa (japonica cultivar-group)
  CDS (1)..(1179)
atgtccatgcaggagatgctccgcattggagacgacgacggccggagcgatgctctggaacgcgagctcaaggagaagctgaggttgcgcggcgatgcctcaccggcgaaatgcaccaggcaggagcagcggtggcggtctgatcatggcatcgtcgacgcccgcgagaggttcgtgcaggcgtacggccgcctcagggacgatctcgtcggcgacgactcgtgcgagctcaccgacgaagccaggcgctggcttgctcagatgatcgactacaatgtacctggaggaaagttgaaccgagggctgtcagtgatagacagttacctgctgttgaaacaaggaagtgaggttactgaagatgacttcttccttgcttgtgtgcttggttggtgtgtagaatggtttcaagcatgtgcactactacttgatgacatcatggacgattcacataccaggagagatcagatttgctggtaccggcgacctgaggttggcctcaggggtataaacgatggtatcatactaaaatgtcacatcttgataatgataaaaaagtatttcagagaaaagccttactttcttgatatcttagaaatatggagcgagatagctctgcagacttctctggggcagatgcttgatcttattagcacacatactggagcagatgatcttgcaaaatacagtattgaaggctaccgtcgcattgttaagtacaagacagcgtactactccttttaccttcctgtggccaatgctttgctcttatctggcgcaaaacttgaagacttcagtggtctaaaggatatacttattgaaatgggcatatattttcagatacaggatgactacttggactgttttgctgaccctaacaccataggcaagattggaactgacatcgaagatcataagtgttcctggttaatagtacaggctcttggtcatgctgacaacaatcaaatagaagtactacataggaactatggcaagaaggattcaagttctgtttccgaagtaaagaggacttacgcggcgcttgatttgaaagatatcttctccgagttcgaacgtcgatgctacaaccacctggtcacctctatcgaagctcagaaggatcatgcagcacgggagatcctgatatcatttctgaagaaaattcatcaaaggaagaagtag

SEQ ID NO: 1022 - protein, 392 aa, Oryza sativa
  Oryza sativa (japonica cultivar-group)
MSMQEMLRIGDDDGRSDALERELKEKLRLRGDASPAKCTRQEQRWRSDHGIVDARERFVQAYGRLRDDLVGDDSCELTDEARRWLAQMIDYNVPGGKLNRGLSVIDSYLLLKQGSEVTEDDFFLACVLGWCVEWFQACALLLDDIMDDSHTRRDQICWYRRPEVGLRGINDGIILKCHILIMIKKYFREKPYFLDILEIWSEIALQTSLGQMLDLISTHTGADDLAKYSIEGYRRIVKYKTAYYSFYLPVANALLLSGAKLEDFSGLKDILIEMGIYFQIQDDYLDCFADPNTIGKIGTDIEDHKCSWLIVQALGHADNNQIEVLHRNYGKKDSSSVSEVKRTYAALDLKDIFSEFERRCYNHLVTSIEAQKDHAAREILISFLKKIHQRKK

SEQ ID NO: 1023 - DNA, 1068 bp, Oryza sativa
  Oryza sativa (japonica cultivar-group)
  CDS (1)..(1068)
atggcggcggcgaatgggagcgcctgcggcggaggcggcgtggacaaggagaaggaggagttcaagcagatctacggggtgctcaaggaggagctgctcagggaccccgccttcgagttcaccgactcgtcgcggcagtggatcgatcgcatgttggactacaatgtacctggagggaagtgcaatcgtggtctctctgtggtcgatagctataagctgttgaagggcaccaatgttctaagtcaggaagacatgtttctcgcgagcactcttggttggtgcgttgaatggcttcaagcttactttctcgtgcttgatgatatcatggatgattctcacactcgacgtggtcagccttgttggtttcgggtgcctcaggttggctccattgctatcaatgatggaattatccttcgcaaccatatcacgcgaatgcttcggctccactttagaggaaaactttactatgctgatctccttgatttattcaatgaggtcgagttcaagacagcttcaggtcaattgctagaccttatcactactcacgagggagaaaaagatctaaacaaatataacataggagttcaccgccgcattgttcaatataagacatcctactattcattttatctgccggttgcttgtgcactgttgctatctggagaggacttgaccaaatatggtgctgtagaagacattcttgttaagatgggaatatactttcaagtccaagacgattatctagattgttatggtgaccccaaatttattggcaagatcgggactgacattgaagattacaaatgctcttggctagttgtgcaagcccttgagcgtgctgatgagagtcaaaagagcgttctatttgaaaattatggaaagaaagatccagcctgtgtggcaaaagtgaagagcctctacagagaactaaacctagaggcggtctttctggactatgagaacgagagttacaagaagttgattgcggatatagaagcccagccaagcatagctgttcagaatgttctgaagtccttcttgcacaagatctacaagagacagaagtag

SEQ ID NO: 1024 - protein, 355 aa, Oryza sativa
  Oryza sativa (japonica cultivar-group)
MAAANGSACGGGGVDKEKEEFKQIYGVLKEELLRDPAFEFTDSSRQWIDRMLDYNVPGGKCNRGLSVVDSYKLLKGTNVLSQEDMFLASTLGWCVEWLQAYFLVLDDIMDDSHTRRGQPCWFRVPQVGSIAINDGIILRNHITRMLRLHFRGKLYYADLLDLFNEVEFKTASGQLLDLITTHEGEKDLNKYNIGVHRRIVQYKTSYYSFYLPVACALLLSGEDLTKYGAVEDILVKMGIYFQVQDDYLDCYGDPKFIGKIGTDIEDYKCSWLVVQALERADESQKSVLFENYGKKDPACVAKVKSLYRELNLEAVFLDYENESYKKLIADIEAQPSIAVQNVLKSFLHKIYKRQK

SEQ ID NO: 1025 - DNA, 1056 bp, Schizosaccharomyces pombe 972h-
  CDS (1)..(1056)
atggtcaacgattttaatgaaaaaaatggcattaagaaaagacttctagatttcttcccagtcgttctcgaaggaattcgtgaaatcttagaaagcatgcaatacttccccgaagaaaccgagaagctgttatattccataaagagaaatacgttaggaggaaagaataatcgaggactggcagttttgcaatctttaacaagccttattaatcgagaacttgaagaagcagaatttcgcgacgctgctctcctaggttggctaattgaaattttgcaaggttgctttttaatggcagatgatattatggatcagtctatcaaacgacgtggtttagattgttggtatttggtagttggtgtacgaagggcaattaatgagtcacaattactagaagcatgtattccacttttaattcgaaagtatttcagaaatatgccatactatgtcgatttattggatactttccgagaggttacttttctcaccgagttggggcaacaagaagatttgctttcatcacgagacggagaagcctcgttacgatcttttgatttaatgaaatatgactttattatcacttataaaacatcattttattccttttaccttcctattaaatgtgctttattgttgtctcgcaattcgaatcaaaaggcgtatgatacgactataaagctttcaaaacttcttggttattatttccaagtccaagatgactacttagattgtttcggtgattacacggttttgggtaaagtgggaatggacatacaagacaataaatgcacatggctagtttgttatgctgaaaaatttgcctctgcggatcagctgaatcttcttcgtgctcattatggaaaagcagggtctgaaaacatagctgtaataaagcagctttatcatgagcttcaaatacctgaattatatcacaaatttgaagatgacatggtggattctatatccaaagaaattgatttgattgatgaatctactggattgaaaaagtgtatatttactaagttttttcagctcatttacaaaaggtcacggtag

SEQ ID NO: 1026 - protein, 351 aa, Schizosaccharomyces pombe
  Schizosaccharomyces pombe 972h-
MVNDFNEKNGIKKRLLDFFPVVLEGIREILESMQYFPEETEKLLYSIKRNTLGGKNNRGLAVLQSLTSLINRELEEAEFRDAALLGWLIEILQGCFLMADDIMDQSIKRRGLDCWYLVVGVRRAINESQLLEACIPLLIRKYFRNMPYYVDLLDTFREVTFLTELGQQEDLLSSRDGEASLRSFDLMKYDFIITYKTSFYSFYLPIKCALLLSRNSNQKAYDTTIKLSKLLGYYFQVQDDYLDCFGDYTVLGKVGMDIQDNKCTWLVCYAEKFASADQLNLLRAHYGKAGSENIAVIKQLYHELQIPELYHKFEDDMVDSISKEIDLIDESTGLKKCIFTKFFQLIYKRSR

SEQ ID NO: 1027 - DNA, 1056 bp, Oryza sativa
  Oryza sativa (japonica cultivar-group)
  CDS (1)..(1056)
atggccgccgcgggtgcgggggcgagcggaccggcggcggagacagcggccgcgacgttccggcgggtgtacggcacactcaaggcagagcttctcaaggacccctccttcgacttcaacgacgacgccatccaatggctcgagagcatgctggactacaacgtgcttggtggaaaattgaaccgtggcttggctgttgttgagagctacaaaatactgaaagctgctagcgcaacagaaccgagcgaggaggaattgtttcttgcatgcatccttggttggggcatcgaatggcttcaggcctattttctggttcttgatgatataatggataactcacaaactcgacgaggaaaaccctgttggtttaggcttcccaaggtcggcctcatagctataaatgatggactcgtccttcgcagccaaatttcaaggatctttaggcgctattttcgtggaaaaagttactatgttgatctcctagatttattcaatgaggttgaaattcagacaacttcaggccagttattagatcaaattacaacaaatgaaggaaggaaagatctgaacaaatataggcgcattgtggaatataagacagcttactattcattttatttgccggttgcatgcgcactgctgttgtttgatgagagtttggacaattatgctcaagtgaagcatatcctagttgagatgggtgtttactttcaaagccaggatgattatctggactgttttggtgaaccagaaattattggcaagataggaagtgacattgaagatttcaagtgttcttggctatttgttcaagcacttgagcgcgctgatgagaaacaaaaaggagtcttgtttgaaaattatgggaaatcagatccagcttgtgttgccaaagtgaaggatctatataacgaacttcatctccagcgggtgttttctgagtatgaaagggagagctatgaaaagctgatctcagccatcgaagcacaaccgaatgaagcagtacgagcggttctgaaatcttttctgcacaagatctacaagaggagcaagtag

SEQ ID NO: 1028 - protein, 351 aa, Oryza sativa
  Oryza sativa (japonica cultivar-group)
MAAAGAGASGPAAETAAATFRRVYGTLKAELLKDPSFDFNDDAIQWLESMLDYNVLGGKLNRGLAVVESYKILKAASATEPSEEELFLACILGWGIEWLQAYFLVLDDIMDNSQTRRGKPCWFRLPKVGLIAINDGLVLRSQISRIFRRYFRGKSYYVDLLDLFNEVEIQTTSGQLLDQITTNEGRKDLNKYRRIVEYKTAYYSFYLPVACALLLFDESLDNYAQVKHILVEMGVYFQSQDDYLDCFGEPEIIGKIGSDIEDFKCSWLFVQALERADEKQKGVLFENYGKSDPACVAKVKDLYNELHLQRVFSEYERESYEKLISAIEAQPNEAVRAVLKSFLHKIYKRSK

SEQ ID NO: 1029 - DNA, 1062 bp, Oryza sativa
  Oryza sativa (japonica cultivar-group)
  CDS (1)..(1062)
atggcggcggcggtggtggcgaacggcgcgagcggcgactcctccaaggccgcgttcgcggagatatacagcaggctcaaggaggagatgctcgaggacccggccttcgagttcaccgacgagtcgctccagtggatcgaccgcatgctggattacaatgtgctcggaggaaagtgcaaccgcgggatctctgtcattgatagtttcaagatgttgaagggcactgatgttctgaataaggaggagacatttcttgcctgcacccttggttggtgcattgaatggcttcaagcttattttcttgtgcttgatgatattatggacaactctcaaacacgacgtggccagccttgctggtttagggtgcctcaggttgggctcattgctgtaaatgatggtattatccttcgcaaccatatttcacgaattcttcaacgccattttaaaggaaagctgtattatgttgatctcattgatttgttcaatgaggttgagtttaagactgcttcaggtcaattgttggatcttattactactcatgagggagaaaaggatctcacaaagtacaacttgacagttcaccgccgcattgttcagtacaagacagcttactactcattctatcttccggttgcatgtgctttgctgctatctggtgagaatttggataacttcggtgatgttaagaacattcttgtggaaatggggacatacttccaagttcaggatgattatctagattgttatggtgatcctgagtttattggcaagattggaacggacattgaagactacaagtgctcatggttagttgtgcaagctctcgagcgtgctgacgagaaccaaaagcacattctatttgaaaattatgggaagccagatcctgaatgtgttgcaaaagtgaaggatctgtataaagaacttaatctggaggccgtatttcatgaatacgagagggagagttacaataagctgattgccgacatcgaagcacatccgaacaaagcagttcagaatgtattgaaatccttcctgcacaagatctacaagaggcagaagtag

SEQ ID NO: 1030 - protein, 353 aa, Oryza sativa
  Oryza sativa (japonica cultivar-group)
MAAAVVANGASGDSSKAAFAEIYSRLKEEMLEDPAFEFTDESLQWIDRMLDYNVLGGKCNRGISVIDSFKMLKGTDVLNKEETFLACTLGWCIEWLQAYFLVLDDIMDNSQTRRGQPCWFRVPQVGLIAVNDGIILRNHISRILQRHFKGKLYYVDLIDLFNEVEFKTASGQLLDLITTHEGEKDLTKYNLTVHRRIVQYKTAYYSFYLPVACALLLSGENLDNFGDVKNILVEMGTYFQVQDDYLDCYGDPEFIGKIGTDIEDYKCSWLVVQALERADENQKHILFENYGKPDPECVAKVKDLYKELNLEAVFHEYERESYNKLIADIEAHPNKAVQNVLKSFLHKIYKRQK

SEQ ID NO: 1031 - DNA, 1056 bp, Eremothecium gossypii
  CDS (1)..(1056)
atgactaaggaagacaataggaagaagttcgtggacgagttcccatcgttggtgtcacagttgacgcagtccttgcgcgagtacgggatcccccaggacgctatcgactggtacgagaagtcgttgaactacaacaccccaggtggtaagttgaaccgcggcctctctgttgtggacacgtacgtcatcctaaagaactgcaagtcgccgctcgacttgccggtggacgaatacaggcgcgtagcgctcttggggtggtgcgtagagttgttgcaggcgtacttcttggtggccgacgacatgatggacaagtcgatcacccggcgtggtcagccctgctggtaccgtgtggaggaggtgggcgacatggccatcaacgatgctttcatgctggaagcggccatctactgtttgttgaagcgcaacttccgcgaccagccctactatgtggaccttctcgagttgttgcacgacgtcacgttccagacggaagtcggccagttgttggacttgatgaccgcgcccgagtttatcgtggacttgaacaagttctcgttgcagcgccattcctacatcgtgatcttcaagaccgcctactactcgttctacttgcccgtcgccttggccatgtacgccgccggcgtcaacgacgagcgcgacttcgcccaggcccgtgaggtcttgcttccactcggcgagtacttccagatccaggacgactacttggactgcttcggcaggcccgaggacatcggcaagatcggcaccgacatccaggacaacaagtgctcctgggtcatcaacgcggccttgaagctttgctcccccgagcagcgcaagatcttagacgagaactacggccgtaaggacccggagtgcgagcagcgctgcaagcagatcttctacgacttgaagctccaggaagtttacgagcgctacgaggagcaggttgccgcccgcttgcgcgagcgcatcggcgagatcgacgaatcacgtggcttccgccgcgaggtgttgtactccttcttggacaaggtgtacaggagaaagaagtag

SEQ ID NO: 1032 - protein, 351 aa, Eremothecium gossypii
MTKEDNRKKFVDEFPSLVSQLTQSLREYGIPQDAIDWYEKSLNYNTPGGKLNRGLSVVDTYVILKNCKSPLDLPVDEYRRVALLGWCVELLQAYFLVADDMMDKSITRRGQPCWYRVEEVGDMAINDAFMLEAAIYCLLKRNFRDQPYYVDLLELLHDVTFQTEVGQLLDLMTAPEFIVDLNKFSLQRHSYIVIFKTAYYSFYLPVALAMYAAGVNDERDFAQAREVLLPLGEYFQIQDDYLDCFGRPEDIGKIGTDIQDNKCSWVINAALKLCSPEQRKILDENYGRKDPECEQRCKQIFYDLKLQEVYERYEEQVAARLRERIGEIDESRGFRREVLYSFLDKVYRRKK

SEQ ID NO: 1033 - DNA, 1047 bp, Magnaporthe grisea 70-15
  CDS (1)..(1047)
atggccgcatcaaaaacaacactccaagagtttgaggccgtcttccccaagcttgaggaggtcctgctcgagcatgccaagtcttacaagctgccccagggcgagatggcatggtacaagaagagtctcgagacgaacgccatcggtggcaagtgcaaccgcggcatgtccgtccccgactcagtctcggccctcctcgagcgtcccctttcggaagacgagtacttcaaggcggccaccctcggttggatgacggagctcctgcaggcattcttcctcgtctcggacgacatcatggactcgtccatcactcgccgtggccagccgtgctggtaccgtcaggacggcgtgggcatggttgccatcaacgatgccttcatgctcgaggctgccatctacacactcctgaagaagttcttccgtgaccaccccgcctacgtcgaccttctcgagctcttccacgaggttacataccagaccgagatcggacagttgtgtgatctgctcaccgcccccgaggacaaggtcaacctcgacaacttcagcatggagaagtaccgcttcattgtcatctacaagacggcctactactccttctacctgcccgttgccctggccctgcaccagctcaacatcggcacccccgagaacctaaaggtcgccgaggatatcctgatccccatgggagagtacttccaggtccaggacgactacctcgacaactttggcctgccggaacacattggcaagattggcaccgacatcatggacaacaagtgcagctggctcgtcaaccaggctctgtccattgctactcctgaacagaggaagattctcgaggagaactatggtcgcaaggacaaggccaacgaggccgtcatcaagaagctctatgacgacatgggactggagcaaaagtacaaggactacgaggagaaggtggttggtgagattcgtgagaagatctctcagattgatgagagcaagggattgaagaggagtgtgtttgagacgttccttgagaagatttacaagaggagcaaatag

SEQ ID NO: 1034 - protein, 348 aa, Magnaporthe grisea
  Magnaporthe grisea 70-15
MAASKTTLQEFEAVFPKLEEVLLEHAKSYKLPQGEMAWYKKSLETNAIGGKCNRGMSVPDSVSALLERPLSEDEYFKAATLGWMTELLQAFFLVSDDIMDSSITRRGQPCWYRQDGVGMVAINDAFMLEAAIYTLLKKFFRDHPAYVDLLELFHEVTYQTEIGQLCDLLTAPEDKVNLDNFSMEKYRFIVIYKTAYYSFYLPVALALHQLNIGTPENLKVAEDILIPMGEYFQVQDDYLDNFGLPEHIGKIGTDIMDNKCSWLVNQALSIATPEQRKILEENYGRKDKANEAVIKKLYDDMGLEQKYKDYEEKVVGEIREKISQIDESKGLKRSVFETFLEKIYKRSK

SEQ ID NO: 1035 - DNA, 1044 bp, Gibberella zeae
  Gibberella zeae PH-1
  CDS (1)..(1044)
atggctaaacaaactaccctcgacgagttcaacgccgtcttccccaagctcgaggaggttctcctcgaccatgctcgctcttacaagctcccccaggagcagcttgactggtacaagaagtctctcgaggccaaccctctcggcggaaaatgcaaccgcggcatgtccgtccccgattccgtctctctcctcctcgagaagccccttactgaggagcaatacttccaggccgctactctcggctggatgacagagctcctccaggctttcttcctcgtttccgacgatatcatggactccagcatcacccgtcgtggccagccctgctggtaccgtcaggagggtgttggcatgatcgccattaacgacgcctttatgctcgagatggccatctacactcttctcaagaagtacttccgcacccaccctgcctacgtcgacctcatcgagctgttccacgagaccaccttccagaccgagctcggccagctgtgtgacttgctcaccgcccctgaggacaatgtcaaccttgacaacttctccctcgagaagtacagcttcatcgtcatctacaagaccgcctactactccttctacctccctgttgcgcttgccctccaccagctcaacctcgccacccccagcaacctcaagcaagctgaggatatcctcatccctctcggagagtacttccagatccaggacgactaccttgacaactttggcaagcccgaacacattggcaagattggtaccgatatcaaggacaacaagtgctcttggctcgtgaaccaggctcttgccgttgccacccccgagcagcgcaagatccttgaggagaactacggccgcaaggacgatgccaaggagctggtcgtcaagaagctctacgacgacctgaagcttgagcagctctacctcgactacgaggagaaggttgttggccagatccgcgagcgcattgccaacattgacgagagcggtggcctcaagaagaccgtgtttgaggccttcctcgccaagatctacaagcgcagcaagtaa

SEQ ID NO: 1036 - protein, 347 aa, Gibberella zeae
  Gibberella zeae PH-1
MAKQTTLDEFNAVFPKLEEVLLDHARSYKLPQEQLDWYKKSLEANPLGGKCNRGMSVPDSVSLLLEKPLTEEQYFQAATLGWMTELLQAFFLVSDDIMDSSITRRGQPCWYRQEGVGMIAINDAFMLEMAIYTLLKKYFRTHPAYVDLIELFHETTFQTELGQLCDLLTAPEDNVNLDNFSLEKYSFIVIYKTAYYSFYLPVALALHQLNLATPSNLKQAEDILIPLGEYFQIQDDYLDNFGKPEHIGKIGTDIKDNKCSWLVNQALAVATPEQRKILEENYGRKDDAKELVVKKLYDDLKLEQLYLDYEEKVVGQIRERIANIDESGGLKKTVFEAFLAKIYKRSK

SEQ ID NO: 1037 - DNA, 1056 bp, Candida glabrata
  Candida glabrata CBS 138
  CDS (1)..(1056)
atgtcaaaagaagcaagtagacaaaaatttgttgatgaattcccatcattggtccaagaattgagagttgtgcttgagggttatggtatgcctaaggaggctattgagtggtacgaatcttcactaaactacaacacacctggtggtaagttgaaccgaggcttgtcagtggttgatacttatgccattcttaaaggatatgagtccgttgatgatatgaaagatgatgaatataagaaggttgctctattgggatggtgcattgagttattacaagcctactttttagtagccgatgatatgatggacaagtccattacaagaagaggtcaaccatgttggtaccgtgttaaaaatgtcaatgagatagcaattaatgatgcttttatgctcgaggctgccatatatgtactattgaagaaacatttcagaaatgactcatattatgttgatttgttagaattgttccatgatgttactttccaaactgagttgggtcaattgttagacttaattactgcgccagaagatcatgttgacttatctaaattttcgctttccaaacattcctttattgtgatcttcaaaactgcttactactccttttatcttccagttgctcttgctatgtatgccgctggtgttaacgattcgaaggatctgaagcaggcccaagatgttctgattccattgggggaatacttccaaattcaggatgattatttggattgtttcggtacaccagagcaaattggaaaaattggtacagatattcaagataataagtgttcatggattattaataaagctttggaattggcaaatgagaagcaaagaaagatcttagatgaaaattatggccgcaaggattcaaaatgtgaagctaactgtaaggctgttttcagtgaattaaaaattgatattcattaccgtgaatatgaggaagctgttgcaaacgagctaaaagataaaattagtcaagttgatgaaagtcgtggttttaagaaagaagtattgactgcgttcttgaataaggtgtacaaaagatctaaataa

SEQ ID NO: 1038 - protein, 351 aa, Candida glabrata
  Candida glabrata CBS 138
MSKEASRQKFVDEFPSLVQELRVVLEGYGMPKEAIEWYESSLNYNTPGGKLNRGLSVVDTYAILKGYESVDDMKDDEYKKVALLGWCIELLQAYFLVADDMMDKSITRRGQPCWYRVKNVNEIAINDAFMLEAAIYVLLKKHFRNDSYYVDLLELFHDVTFQTELGQLLDLITAPEDHVDLSKFSLSKHSFIVIFKTAYYSFYLPVALAMYAAGVNDSKDLKQAQDVLIPLGEYFQIQDDYLDCFGTPEQIGKIGTDIQDNKCSWIINKALELANEKQRKILDENYGRKDSKCEANCKAVFSELKIDIHYREYEEAVANELKDKISQVDESRGFKKEVLTAFLNKVYKRSK

SEQ ID NO: 1039 - DNA, 1053 bp, Debaryomyces hansenii
  Debaryomyces hansenii CBS767
  CDS (1)..(1053)
atggacaaggctgcagctaaggaaaggtttattaatgaattcgaccaattggtcgaagagttgaaggccattttaattgggtataaaatgccacaagatgctattgactggtttgttggtaacttgaactataatacgccaggtggtaagttaaacagaggtttgtcagtaatcgacacttattgtattttaaacaacaccactgccaacgatttgtcctctgaagaatattctaaggttgccttattaggatggtgtatcgaattattgcaagcttacttcttagttgccgatgatatgatggatcattctaaaacaagaagaggtcaaccttgttggtacttaaacgaaggcgtcggtaacattgcgattaatgactccttcatgttggaaggtgctctttacattttgttaaagaagcatttccgtaatgagaaatactacgtcgatttattggatttgttccacgaagttaccttccaaacagaattaggccaattaatagatttgatcacagctgatgaagaaatcgtcgaccttgataagttctcattatcaaaacattcatttatcgttatttacaagaccgcctactactcattttacttacctgtcgccttagcgatgttcatgagtggaattaacagtgagcaagacttaaaacaagttcgcgatatattgatcccattaggtgaatacttccaaattcaagatgatttcttggattgttttggtactccagagcaaatcggtaagattggtactgatatcaaagacaacaagtgctcgtgggttgttaaccaagctttattacatgccaacgaagaacaacggaagttgttagacgaaaattacggtaagaaagatgacgaatctgaaaaaaggtgtaaacaattatttaaagacttgaacatcgagaagatctattttgactacgaagaagataccggagctaagttaagaaagcaaattgaacaaatcgatgaatcaagaggcttaaagaaggaagtcttaacatccttcttaaacaaagtctacaaacgttccaaatag

SEQ ID NO: 1040 - protein, 350 aa, Debaryomyces hansenii
  Debaryomyces hansenii CBS767
MDKAAAKERFINEFDQLVEELKAILIGYKMPQDAIDWFVGNLNYNTPGGKLNRGLSVIDTYCILNNTTANDLSSEEYSKVALLGWCIELLQAYFLVADDMMDHSKTRRGQPCWYLNEGVGNIAINDSFMLEGALYILLKKHFRNEKYYVDLLDLFHEVTFQTELGQLIDLITADEEIVDLDKFSLSKHSFIVIYKTAYYSFYLPVALAMFMSGINSEQDLKQVRDILIPLGEYFQIQDDFLDCFGTPEQIGKIGTDIKDNKCSWVVNQALLHANEEQRKLLDENYGKKDDESEKRCKQLFKDLNIEKIYFDYEEDTGAKLRKQIEQIDESRGLKKEVLTSFLNKVYKRSK

SEQ ID NO: 1041 - DNA, 1224 bp, Oryza sativa
  Oryza sativa (japonica cultivar-group)
  CDS (1)..(1224)
atgggggcgctggcggcgtcgatcgcgtcgcacctgccgtcgggggtgtcggcggcggtggcggcgctggcggcgagcccgggggaggtggtgaggagggcggcggggctggaggacgagctccgggagcttctccggctgaacggcggcgggcgcgggcggggcggcgcggcggcggagcaggggcagggcgagcagacgagggacaggttcgtgcgcgcgtacgagcggctcaagagtgagctgctcaacgaccgagccttcaacttcgacttcactgaggagaccaggcagtgggtcgccaagatgatggactacaacgtgccaggagggaaactgaaccgtgggctctcggtggtggacagctacatgctgctgagacaaggaaccgaggttgacgacgaggatttctacctcgcctgcgtgctcggttggtgcgtcgaatggctgcaagcgtcagcccttgtgctcgatgacatcacggacaacgcctacacgaggcgagataacctctgctggtacaagctaccaacggttggcatgtctgctataaacgatggtgtgctgctcaagtgccatgtccaggcaatcatcaagagatacttcaaggagaagttctacttcctggacctcatggagctatggaacgagataggcttgcagactgccatggggcagatgctggatctcatcaccactcataccggcgccaaggatctcgccagatacagaattcaggggtaccgtcgcattgtcaagtacaagacatcatactattcgttctacctgccggttgcatgtgcattactcttgaatggcgcgagattgagtgactatgttgagctgaaaaatgtacttatcgaaatgggcgtatactttcagatacaggatgactacttggattgctttggtgacccagaagtgattggcaaggttggaacagacattgaagactacaagtgttcctggctaatagtacaggctatggaactcgccaatgagaatgagatgaaaatactatatgagaactacgggaagtctgacccaaaatgcgtagcagaagtgaagagcgtttacagggagcttgatcttcaggacatatttttggagtacgagtcaagagtttacaagcacctggtttcgaccatcgacgccgagactgaccgtgcaattcgggatattttgaagtcgtttctgaagaagatttacaggaggaagaagtag

SEQ ID NO: 1042 - protein, 407 aa, Oryza sativa
  Oryza sativa (japonica cultivar-group)
MGALAASIASHLPSGVSAAVAALAASPGEVVRRAAGLEDELRELLRLNGGGRGRGGAAAEQGQGEQTRDRFVRAYERLKSELLNDRAFNFDFTEETRQWVAKMMDYNVPGGKLNRGLSVVDSYMLLRQGTEVDDEDFYLACVLGWCVEWLQASALVLDDITDNAYTRRDNLCWYKLPTVGMSAINDGVLLKCHVQAIIKRYFKEKFYFLDLMELWNEIGLQTAMGQMLDLITTHTGAKDLARYRIQGYRRIVKYKTSYYSFYLPVACALLLNGARLSDYVELKNVLIEMGVYFQIQDDYLDCFGDPEVIGKVGTDIEDYKCSWLIVQAMELANENEMKILYENYGKSDPKCVAEVKSVYRELDLQDIFLEYESRVYKHLVSTIDAETDRAIRDILKSFLKKIYRRKK

SEQ ID NO: 1043 - DNA, 1035 bp, Yarrowia lipolytica
  Yarrowia lipolytica CLIB122
  CDS (1)..(1035)
atgtccaaggcgaaattcgaaagcgtgttcccccgaatctccgaggagctggtgcagctgctgcgagacgagggtctgccccaggatgccgtgcagtggttttccgactcacttcagtacaactgtgtgggtggaaagctcaaccgaggcctgtctgtggtcgacacctaccagctactgaccggcaagaaggagctcgatgacgaggagtactaccgactcgcgctgctcggctggctgattgagctgctgcaggcgtttttcctcgtgtcggacgacattatggatgagtccaagacccgacgaggccagccctgctggtacctcaagcccaaggtcggcatgattgccatcaacgatgctttcatgctagagagtggcatctacattctgcttaagaagcatttccgacaggagaagtactacattgaccttgtcgagctgttccacgacatttcgttcaagaccgagctgggccagctggtggatcttctgactgcccccgaggatgaggttgatctcaaccggttctctctggacaagcactcctttattgtgcgatacaagactgcttactactccttctacctgcccgttgttctagccatgtacgtggccggcattaccaaccccaaggacctgcagcaggccatggatgtgctgatccctctcggagagtacttccaggtccaggacgactaccttgacaactttggagaccccgagttcattggtaagatcggcaccgacatccaggacaacaagtgctcctggctcgttaacaaagcccttcagaaggccacccccgagcagcgacagatcctcgaggacaactacggcgtcaaggacaagtccaaggagctcgtcatcaagaaactgtatgatgacatgaagattgagcaggactaccttgactacgaggaggaggttgttggcgacatcaagaagaagatcgagcaggttgacgagagccgaggcttcaagaaggaggtgctcaacgctttcctcgccaagatttacaagcgacagaagtag

SEQ ID NO: 1044 - protein, 344 aa, Yarrowia lipolytica
  Yarrowia lipolytica CLIB122
MSKAKFESVFPRISEELVQLLRDEGLPQDAVQWFSDSLQYNCVGGKLNRGLSVVDTYQLLTGKKELDDEEYYRLALLGWLIELLQAFFLVSDDIMDESKTRRGQPCWYLKPKVGMIAINDAFMLESGIYILLKKHFRQEKYYIDLVELFHDISFKTELGQLVDLLTAPEDEVDLNRFSLDKHSFIVRYKTAYYSFYLPVVLAMYVAGITNPKDLQQAMDVLIPLGEYFQVQDDYLDNFGDPEFIGKIGTDIQDNKCSWLVNKALQKATPEQRQILEDNYGVKDKSKELVIKKLYDDMKIEQDYLDYEEEVVGDIKKKIEQVDESRGFKKEVLNAFLAKIYKRQK

SEQ ID NO: 1045 - DNA, 1044 bp, Aspergillus nidulans
  Aspergillus nidulans FGSC A4
  CDS (1)..(1044)
atgccatctactacaagccgcgctgccttcgaggcggtcttcccctccctggctgaggccatgcttgaccatgcgaggaaatacaacctgccccaaaatgctcaggaatggttcagcaaggccattcacaccaacgtccctggcggcaagctcaaccgcggtctctctgtccccgacaccggcgtggccctcctgcagaaggaactgagcgaggagcaatacaaggaccttgctacacttgggtggctgaccgagctgctccaggccttcttcctcgtcagcgatgaccttatggatggttcaatcacccgtcgcggccagccctgctggtaccgccaccagggggtcggtctcattgccatcaacgacgctttcctccttgagtccggtatctacgttatcctgaagaagcaattccgttcacaccctgcctacgtcgactttattgagctgttccatgagaccacctggcagacggaattgggccagctgtgtgatctgatcacggcgcccgaggacaaggtcgatctcaacaacttctccatggagaagtacatgttcattgtcacctacaagaccgcctactatagcttctacctcccggttgccctggccctccactaccttcagcttgctacccccgagaacctccgtcaggctcacgacatcctcattccgctcggccaatacttccaggtccaggatgactacctcgatgcgtacggcgaccccgaggtcattggcaagatcggaacagatatccaggacaacaagtgctcttggttagtgaaccaggctctgcagcgctgcagtgccgagcagcgcaaggtgctcgacgctgcctatggtcgtaaggacgctgagcaagaggccaaggtcaaggctattttccgggaattggacctcgaatccgtctacaaggagtacgaggagaagatcgtgggtgagctgaagacgaagatcgcggctgtcaacgagtcggaggggttgaagaaggaggtttttgaggcattcctcgggaagatctacaagcgcagtaaataa

SEQ ID NO: 1046 - protein, 347 aa, Aspergillus nidulans
  Aspergillus nidulans FGSC A4
MPSTTSRAAFEAVFPSLAEAMLDHARKYNLPQNAQEWFSKAIHTNVPGGKLNRGLSVPDTGVALLQKELSEEQYKDLATLGWLTELLQAFFLVSDDLMDGSITRRGQPCWYRHQGVGLIAINDAFLLESGIYVILKKQFRSHPAYVDFIELFHETTWQTELGQLCDLITAPEDKVDLNNFSMEKYMFIVTYKTAYYSFYLPVALALHYLQLATPENLRQAHDILIPLGQYFQVQDDYLDAYGDPEVIGKIGTDIQDNKCSWLVNQALQRCSAEQRKVLDAAYGRKDAEQEAKVKAIFRELDLESVYKEYEEKIVGELKTKIAAVNESEGLKKEVFEAFLGKIYKRSK

SEQ ID NO: 1047 - DNA, 1056 bp, Candida albicans
  Candida albicans SC5314
  CDS (1)..(1056): transl_table=12
atgtctgataaacttgctgctagagaaagatttcttgatgtttttgaagatttagttgaagaattgaaacaaattttagtttcttataatatgcctcaagaagccattgaatggtttgttagaagtttaaattataatactccaggaggtaaattaaatcgaggattatctgtagttgatacatttgccattttgaataatactactagtgataaattaaatgatactgaatataaaaaagttgcattattaggttgggccattgaattattacaagcatattttttagttgctgatgatatgatggatcaatctaaaactagaagaggtcaaccatgttggtatttagttgaaggagttaacaacattgctattaatgattcatttatgttagaaggggccatttatatcttgttgaaaaaacatttccgtcaagatccttactatgttgatttattagatttatttcatgaagtcactttccaaactgaattaggtcaattattagatttaattactgctgatgaagaaattgttgatttagataaattttctttggaaaaacattcatttattgttattttcaaaactgcttattattcattttatttacccgtggcattagcaatgtatatgagtggtattaatgatgaaaaagatttaaaacaagttagagacattttgattcccttgggagaatatttccaaattcaagatgattatttggattgttttggtactccagaacaaattgggaaaatcggtactgatattaaagataataaatgttcttgggttattaatcaagctttattgattgctacccctgaacaacgtcaattattagatgataattatggtaaaaaagatgatgaatcagaacaaaaatgtaaagatttatttaaacaattgggtattgaaaaaatttatcatgattatgaagaatcaattgttgctaaattaagaaaacaaattgatcaaattgatgaatctagaggtttaaagaaagatgttttaactgctttcttaggtaaagtttataaaagatctaaatag

SEQ ID NO: 1048 - protein, 351 aa, Candida albicans
  Candida albicans SC5314
MSDKLAARERFLDVFEDLVEELKQILVSYNMPQEAIEWFVRSLNYNTPGGKLNRGLSVVDTFAILNNTTSDKLNDTEYKKVALLGWAIELLQAYFLVADDMMDQSKTRRGQPCWYLVEGVNNIAINDSFMLEGAIYILLKKHFRQDPYYVDLLDLFHEVTFQTELGQLLDLITADEEIVDLDKFSLEKHSFIVIFKTAYYSFYLPVALAMYMSGINDEKDLKQVRDILIPLGEYFQIQDDYLDCFGTPEQIGKIGTDIKDNKCSWVINQALLIATPEQRQLLDDNYGKKDDESEQKCKDLFKQLGIEKIYHDYEESIVAKLRKQIDQIDESRGLKKDVLTAFLGKVYKRSK

SEQ ID NO: 1049 - DNA, 1200 bp, Ustilago maydis
  Ustilago maydis 521
  CDS (1)..(1200)
atgtcactgaaatcggcgatctgcatgttgcgcttggcttgcggagtctcggagatcagaccactttggcagcgtgtgcaaatccagacacaagaccaacacgctcgtcaggaagaagtgagaccatcttcccgcgttgagacaacgctcgttcagcttcatccttcccgcatcgtgtccctcttcatcaccagcccccttggacaacttcgtttccgcttcaacatgtcaaacgtagacgctcaggctcttgccgacaaggcacagctgaagatccagaagcgcaagcgtttcgagtctgtctttccgctcttggtcgaggagctcaccgcttaccttacatcggaaaagatgcctgccgaggccatcgactggttccgacgcaacctcgactacaacacgcctggaggcaagctgaatcgtggtctctctgtggttgacactgtcgagatcctcctctgcacagattctgatactggcaagatttcgcgtgagctcaccgagcccgaatatctcaaggctgccattctcggctggtgcatcgagcttctgcaagcctacttcctcgttgcagatgatatgatggatgcaagcgtcactcgcagaggtcaaccgtgctggtatcgtgtcgaaggtgtcggcaacatcgccatcaacgacgcctttatgctcgaagcggccatctactttttgctgaaaaagcacttccgttcggatccctactatggcatgctcctcgagctcttccacgatgtcaccttccagactgagctcggccaactcatcgacctcatcactgcgcctgaggactcggtcgacctctccaaattctccctccagaagcaccatcttattgtcgtctacaaaaccgccttctactctttctacctccccgttgccctcgcgatgcgtatggctggcgtcaccgacgagactctgtacaaacaggctcttgatatcctgctccccatgggcgaatatttccaggtccaagatgacttcctcgactgctacggaacgcctgaacaaattggcaagatcggcaccgacatctttgacaacaaatgctcctggaacatcaacatcgcgcttcaaaacgccacacccgaacagcgtcaaattctcgaccagaactacggcaagaaggacgcagagtgcgagaagcgagttaaggagggtcttcaatcagcccaacattga

SEQ ID NO: 1050 - protein, 399 aa, Ustilago maydis
  Ustilago maydis 521
MSLKSAICMLRLACGVSEIRPLWQRVQIQTQDQHARQEEVRPSSRVETTLVQLHPSRIVSLFITSPLGQLRFRFNMSNVDAQALADKAQLKIQKRKRFESVFPLLVEELTAYLTSEKMPAEAIDWFRRNLDYNTPGGKLNRGLSVVDTVEILLCTDSDTGKISRELTEPEYLKAAILGWCIELLQAYFLVADDMMDASVTRRGQPCWYRVEGVGNIAINDAFMLEAAIYFLLKKHFRSDPYYGMLLELFHDVTFQTELGQLIDLITAPEDSVDLSKFSLQKHHLIVVYKTAFYSFYLPVALAMRMAGVTDETLYKQALDILLPMGEYFQVQDDFLDCYGTPEQIGKIGTDIFDNKCSWNINIALQNATPEQRQILDQNYGKKDAECEKRVKEGLQSAQH

SEQ ID NO: 1051 - DNA, 1029 bp, Gossypium arboreum
  CDS (1)..(1029)
atggcggatctcaggtcagcatttctcaatgtgtattcccagctcaaatcggagctccttcaggatccttctttcgagttaaccgatgaatctcgtcaatgggttgaacggatgctggactacaatgtgcctggagggaaactgaatcgtggactctctgtgattgatagctaccgcctgttgaaagatggaaaggaattgacccaagatgagatttttcttacaagtgcgctcggttggtgtattgaatggcttcaggcatattttcttgttcttgatgacatcatggacagctctcacacccggcgtggccagccttgttggtttagattgccgaaggttggtatgattgctgtaaatgacggtgttatacttcgcaatcacatcaccaggattctcaaaaatcactttcgtgggaaaccttactatgtggatctgctagatttatttaatgaggttgagtttcaaacagcttcaggacagatgatagacttgattaccacacttgaaggagaaaaggatctatccaaatactcattgcaacagcaccgtcgcattgttcagtacaagactgcctattattcattttatcttcctgttgcgtgtgcactggttatgtgtggtgaaaatcttgacaaccacatcgatgttaagaacattcttgttgacatgggaatctactttcaagtacaggatgactatttggattgctttggcaatcctgagaccattggtaagattggaactgatattgaaaattttaagtgctcttggttggtggttaaagctttggaattctgtaatgaggagcataataaagtgttatatgagaattatggggaaaccagacctgccaatgttgctaaagtgaaggctctatacaatgagcttaatctcaagggcgtatttgaggactacgaaagcaagagctatgagaggctcgtaacctcaattgaagctcatcctagcaaaccagtgcaagcagtgttgaagtcattcttagggaagatctacaagaggcagaaatag

SEQ ID NO: 1052 - protein, 342 aa, Gossypium arboreum
MADLRSAFLNVYSQLKSELLQDPSFELTDESRQWVERMLDYNVPGGKLNRGLSVIDSYRLLKDGKELTQDEIFLTSALGWCIEWLQAYFLVLDDIMDSSHTRRGQPCWFRLPKVGMIAVNDGVILRNHITRILKNHFRGKPYYVDLLDLFNEVEFQTASGQMIDLITTLEGEKDLSKYSLQQHRRIVQYKTAYYSFYLPVACALVMCGENLDNHIDVKNILVDMGIYFQVQDDYLDCFGNPETIGKIGTDIENFKCSWLVVKALEFCNEEHNKVLYENYGETRPANVAKVKALYNELNLKGVFEDYESKSYERLVTSIEAHPSKPVQAVLKSFLGKIYKRQK

SEQ ID NO: 1053 - DNA, 1044 bp, Tuber borchii
  CDS (1)..(1044)
atggctacaacacgtgcacaattcgaggaagtcttcactaatgttatcatccctgaattgatagctgaggttaagaagactcagatttctgagaatgtcattcaatggatcgagaggaactttctccacaacacccttggtggaaagtacaatcgtggaatgactgttccggaaacttaccgtcttcttactggcaaagagacccttagcctcgcagaatacaaacttagtgcaattctcggatggtgtactgaactgcttcaagcaatgttcctcgtcgccgatgacatcatggatagttccaagacacgccggggctccccctgctggtacctgatggaaggcgttgggaacattgctatcaatgactcgttcctccttgaatcgtctatctacgttcttttgaagaaatactttaaaggaaccgactactacatcgaccttgtcgagcttttccatgatgtcacctggaaaaccgaacttggtcagcttgtagaccttctcacatcccccgaagatagtattgatttgaatcgctttaactacgacaagtactacttcatcgttcgctacaagaccgctttctactccttttatcttccggttgctcttgccatgcatcaggctggaattgccacgccggacaacctaactcgtgctcgcgatgttcttattcccctcggtgaatacttccaggttcaggatgattatctcgattgttacggtaatcccgattacattggtaagatcggtaccgacatcttggataacaagtgcgggtggttggtaaacaaagcgctcgaaattgtgactcctgaacagagaaaacttttggaggacaactatggccagaagaatgcggctgcggagaagaaggtcaaggacctttatcttgagttaaagcttgaagatcattataggcgttacgaatcggagagtatcgcaatggtcaaggggttgattgacggtgtggacgaatctcaggggttgaagaggtctgtacttgaaggtttcctcaacaagatcgctggaagagataaatag

SEQ ID NO: 1054 - protein, 347 aa, Tuber borchii
MATTRAQFEEVFTNVIIPELIAEVKKTQISENVIQWIERNFLHNTLGGKYNRGMTVPETYRLLTGKETLSLAEYKLSAILGWCTELLQAMFLVADDIMDSSKTRRGSPCWYLMEGVGNIAINDSFLLESSIYVLLKKYFKGTDYYIDLVELFHDVTWKTELGQLVDLLTSPEDSIDLNRFNYDKYYFIVRYKTAFYSFYLPVALAMHQAGIATPDNLTRARDVLIPLGEYFQVQDDYLDCYGNPDYIGKIGTDILDNKCGWLVNKALEIVTPEQRKLLEDNYGQKNAAAEKKVKDLYLELKLEDHYRRYESESIAMVKGLIDGVDESQGLKRSVLEGFLNKIAGRDK

SEQ ID NO: 1055 - DNA, 1044 bp, Botrytis cinerea
  CDS (1)..(1044)
atggcgaaggctaccactctcaaggagttcgaatccgtcttcccaaaattggttgatgatttactcgcccatgcccaaaagtacaacctccctcaacagggtcaagattggctcaaggcttccctaaatgccaacacgattggcggaaaatgcaatcgtggaatgtctgttcccgactcagtatctctcctcctcgaagctccactatctgaagaacaatacttcgaatctgccacattaggatggatgactgagctcctccaagctttcttccttgtatcagacgatatcatggacagcagcatcactcgtcgtggtcaaccttgttggtacagacagccaggtgttggtatgatcgctatcaacgacgctttcctcctcgaagccgcgatctactctttattgaagaaatatttccgctctcacccttcctaccttgatctcatcgaactcttccacgaagttacataccagacagaacttggtcaattgtgcgatttgttgacagcaccagaggacaaggtcgacttggacaacttttctatgaccaagtatgacttcattgtcacatacaagactgcttattattccttctaccttcctgtcgccctcgcacttcaccaccagaagatcgcgactccaaagaatcttaagcaagtcgaagatatcttgattccgcttggccaatatttccaaatccaagatgattatcttgacaactttggtctaccagagcacattggcaagattggaactgatatcatggacaacaagtgctcttggctcgtaaacaaagcattggctattgcaacacccgagcaacgtcaaatactcgaggagaactatggtcacaaagacaagactaaggaagccgctgtgaagaagctattcgatgagttaaatctcaagcagatctacgaggactatgaagagaagagggttggtgaaataagagaaatgatttcacaagttgatgagtctgaaggtttaaagaagactgtgtttgagagcttcttgagcaagatttacaagagaagcaagtaa

SEQ ID NO: 1056 - protein, 347 aa, Botrytis cinerea
MAKATTLKEFESVFPKLVDDLLAHAQKYNLPQQGQDWLKASLNANTIGGKCNRGMSVPDSVSLLLEAPLSEEQYFESATLGWMTELLQAFFLVSDDIMDSSITRRGQPCWYRQPGVGMIAINDAFLLEAAIYSLLKKYFRSHPSYLDLIELFHEVTYQTELGQLCDLLTAPEDKVDLDNFSMTKYDFIVTYKTAYYSFYLPVALALHHQKIATPKNLKQVEDILIPLGQYFQIQDDYLDNFGLPEHIGKIGTDIMDNKCSWLVNKALAIATPEQRQILEENYGHKDKTKEAAVKKLFDELNLKQIYEDYEEKRVGEIREMISQVDESEGLKKTVFESFLSKIYKRSK

SEQ ID NO: 1057 - DNA, 1050 bp, Gentiana lutea
  CDS (1)..(1050)
atggcaaatctgaacggaactacatccgatctgagaactacattcttgcaagtctattccgtactcaaatctgagcttttgaatgaccttgctttcgagtggtctcctgattctcgtcaatgggtcgaacggatgctggattacaatgttcctggaggaaagctcaacagaggcctttctgtcattgatagctatgaacagctaaaagaaggaaaggagttaacaaaggatgaggtctttcttgcaagtgctctaggctggtgtattgaatggctccaggcatactttcttgtccttgatgacattatggatggctctcacactaggcgtagccaaccttgttggttcagattgccaaaggttggaatgatagctgtaaatgacggtgttctccttcgcaaccacatacccagaattctcaagaagcactttagagaaaagccttactatgtagacctattggaccttttcaacgaggttgagttccagactgcatccggacagatgatagatttgattactactcttgaaggagaaaaggatctatcaaaatattccttgtctctacaccggaggattgttcagtacaaaactgcgtactactcgttttaccttcctgttgcatgtgcattgcttatggctggtgaaaatttggacaattatgtagatgttaagaacgttcttattgacatgggaatatacttccaagttcaggatgactatttggactgctttggtgaaccagagaagattggaaagattggaaccgatattgaagatttcaagtgctcttggcttgttgtcaaagcattagagaagtgtaatgaagagcaaaaacaacatttattagaacactatggaaaggcaaatcctgaagatgtcgagaaagtcaaacgcctttacaatgatctggatcttcagggcgtatttaaagaatttgaaagcaagagctacgagaaactgaatacctccattgaagctcatccaaacaaagctgtgcaagctgtactcaagtcatttttgggtaagatatacaagaggctgaaataa

SEQ ID NO: 1058 - protein, 349 aa, Gentiana lutea
MANLNGTTSDLRTTFLQVYSVLKSELLNDLAFEWSPDSRQWVERMLDYNVPGGKLNRGLSVIDSYEQLKEGKELTKDEVFLASALGWCIEWLQAYFLVLDDIMDGSHTRRSQPCWFRLPKVGMIAVNDGVLLRNHIPRILKKHFREKPYYVDLLDLFNEVEFQTASGQMIDLITTLEGEKDLSKYSLSLHRRIVQYKTAYYSFYLPVACALLMAGENLDNYVDVKNVLIDMGIYFQVQDDYLDCFGEPEKIGKIGTDIEDFKCSWLVVKALEKCNEEQKQHLLEHYGKANPEDVEKVKRLYNDLDLQGVFKEFESKSYEKLNTSIEAHPNKAVQAVLKSFLGKIYKRLK

SEQ ID NO: 1059 - DNA, 1041 bp, Aspergillus oryzae
  CDS (1)..(1041)
atgcctgccactgaccgtgccgctttccaggaggtcttcccctccttggccgaagatatcctggcctatgcgaaggagtcaaacttgcccgaaaatgccctccagtggtttgagaaggccctcaatgttaacgttcccggtggaaagctgaaccgcggtctttcctgccccgacaccggtctcgctcttctggagaagcccctgaccgaggagcagttcaagcacctcagcattctgggatggctcaccgagcttctccaggctttcttcctggtcagcgatgacattatggacagctcgatcacccgtcgtggtcagccatgctggtaccgtcaggagggtgtcggtctgatcgccattaacgatgccttcctgctcgaatcttccatttatgtcattctcaagaagcacttccgctcgcaccccgcctacgccgacttcatcgatctcttccacgagactacttggcagactgagctaggtcagctctgtgacctgattaccgcccccgaggacaaggtcgacctcaacaacttctccatggagaagtatatgttcatcgtcacctacaagaccgcctactacagcttctacctgcctgtcgccctggctctgctctaccttcagcgtgccacgcccagcaacctccgccaggcccacgacatcctcatccctctgggccagtacttccaggttcaggatgactacctcgatgcctacggcgatcctgaagtcattggtaagatcggtaccgatatcaaggacaacaagtgctcttggctcgtcaatcaggctctccagcgctgcaatgctgagcagcgcaaggtcctcgacgaggcctacggccgtaaggatgacgctcttgaggccaaggtcaaggctctctacaaggagctagatctcgagaaggtctaccaagagtacgaggagaagatcgtcggcgagctgaaggagaagatcgctgccgtggatgagtctgggggcctgaagaaggaggtcttcaacgccttcctcggcaagatctacaagcgctccaaataa

SEQ ID NO: 1060 - protein, 346 aa, Aspergillus oryzae
MPATDRAAFQEVFPSLAEDILAYAKESNLPENALQWFEKALNVNVPGGKLNRGLSCPDTGLALLEKPLTEEQFKHLSILGWLTELLQAFFLVSDDIMDSSITRRGQPCWYRQEGVGLIAINDAFLLESSIYVILKKHFRSHPAYADFIDLFHETTWQTELGQLCDLITAPEDKVDLNNFSMEKYMFIVTYKTAYYSFYLPVALALLYLQRATPSNLRQAHDILIPLGQYFQVQDDYLDAYGDPEVIGKIGTDIKDNKCSWLVNQALQRCNAEQRKVLDEAYGRKDDALEAKVKALYKELDLEKVYQEYEEKIVGELKEKIAAVDESGGLKKEVFNAFLGKIYKRSK

SEQ ID NO: 1061 - DNA, 1056 bp, Taxus x media
  CDS (1)..(1056)
atggattcaaacggaaatgctaattttagtgttgacatgaaatcaaaattcctgcaagtttatgagcatctcaaggctgagatcctgcgtgatccagcctttgactacactgaagatgcccgcgtatgggttgagaagatgctggattacaatgtacctggaggaaaactgaatcgaggtctgtctgtaatcgacagctatagactgctaaaaaatggaaaagtattatctgaaggcgaagtcttccttggatgtgtgcttggatggtgtattgaatggcttcaagcatatttccttgtgctagatgatataatggatggctctcacacaaggcgtggccaaccttgctggttcagattacctaaggttggtttagttgctgctaatgatggaattttgcttcgtaaccacataaccagaattcttaagatgcattttcgtactaaaccatactatagtgatccccttgatttgttcaatgaggttgagtttcaaacagcttgtgggcagttgttagatttgattactactcacgaaggggcaatggatctctcaaagtacaaaatgccaacttatcttcgtatagttcaatataagactgcctactattcgttctatctcccggttgcttgtgccctcttaatggcaggggaaaatctagataacttcgtagatgttaagaacattttaatacaaatgggaacctattttcaagtacaagatgattatctcgattgctttggtgatcctcaagttattgggaagataggaactgatattgaagattttaaatgctcttggctggtagtgcaagcccttgaacaagcaaatgagagccaaattcaaacactatatgctaattatggaaaagcggattcttcttgtgttgcagaagttaaggctttatatagggatcttggacttgaggatgtttttctagagtatgagaatactagtcacaaggacctaatttcttccattgaggctcaagagaaggaatcagtgcagcttgtcttgaagtccttcttggagaagatatacaagcgccagaagtga

SEQ ID NO: 1062 - protein, 351 aa, Taxus x media
MDSNGNANFSVDMKSKFLQVYEHLKAEILRDPAFDYTEDARVWVEKMLDYNVPGGKLNRGLSVIDSYRLLKNGKVLSEGEVFLGCVLGWCIEWLQAYFLVLDDIMDGSHTRRGQPCWFRLPKVGLVAANDGILLRNHITRILKMHFRTKPYYSDPLDLFNEVEFQTACGQLLDLITTHEGAMDLSKYKMPTYLRIVQYKTAYYSFYLPVACALLMAGENLDNFVDVKNILIQMGTYFQVQDDYLDCFGDPQVIGKIGTDIEDFKCSWLVVQALEQANESQIQTLYANYGKADSSCVAEVKALYRDLGLEDVFLEYENTSHKDLISSIEAQEKESVQLVLKSFLEKIYKRQK

SEQ ID NO: 1063 - DNA, 1029 bp, Capsicum annuum
  CDS (1)..(1029)
atgagtgatttcaagtccaagtttatggaagcctactatgtcctcaaatctgagttgcttaatgacccaggtttcgaattcactgatgattctcgtgaatgggtcgataagatgttggagtacaatgtccctggagggaagctgaatcggggactatctgttattgacagctatagtttggtggatgatgggaaagaactaaccagggatgaaatatttaaagcatctgctcttggctggtgcattgaatggcttcaagcatacttccttgttcttgatgatataatggataactctcatacacgtcgaggtcaaccatgctggtacaaagtagaaaaggtcggaatgattgctgttaatgatggcatacttcttcgcaaccacatttcgagaattctgaagaaccacttcaggccaaagtcttattatgttgatcttctagatttgtttaatgaggtagagttccagactgcctctggacaaatgatagatttgatcacaacacatgtaggagagaaagatttatcaaaatactcattgcctattcattgccggattgtccagtataaaactgcttattattcattttacctcccggtggcatgtgcacttcttatggcaggagagaatcttgacaatcatgttgatgtcaagaacatacttattgaaatgggaatctactttcaagttcaggatgattatctagactgtttcgctgacccagaggtgctgggtaagattggcactgatattcaggatttcaagtgttcttggttggttgttaaagctctagaactctgcaacgaggagcaaaagaagatattatatgagaactatggaaaagatgacgctgcttgcattgctaaaataaagacactctataatgatctcaaacttgaggaagtatttctggaatacgagaagaaaacctatgaaaagttggccaactctattgcagctcatccaagcaaagcagtgcaagcagtgcaactatcatttttgggaaagatttataagaggcagaagtag

SEQ ID NO: 1064 - protein, 342 aa, Capsicum annuum
MSDFKSKFMEAYYVLKSELLNDPGFEFTDDSREWVDKMLEYNVPGGKLNRGLSVIDSYSLVDDGKELTRDEIFKASALGWCIEWLQAYFLVLDDIMDNSHTRRGQPCWYKVEKVGMIAVNDGILLRNHISRILKNHFRPKSYYVDLLDLFNEVEFQTASGQMIDLITTHVGEKDLSKYSLPIHCRIVQYKTAYYSFYLPVACALLMAGENLDNHVDVKNILIEMGIYFQVQDDYLDCFADPEVLGKIGTDIQDFKCSWLVVKALELCNEEQKKILYENYGKDDAACIAKIKTLYNDLKLEEVFLEYEKKTYEKLANSIAAHPSKAVQAVQLSFLGKIYKRQK

SEQ ID NO: 1065 - DNA, 1029 bp, Panax ginseng
  CDS (1)..(1029)
atgagcgatctgaagacgagatttctggaggtgtactctgttctgaaatccgagctactcaacgaccctgctttcgagttcaccgatgattctcgccaatgggtcgagcggatgctggactataatgtgcctggaggaaagctgaatcgagggctgtctgttattgacagctacaagttgctgaaagaaggaaaagaactaagtgatgatgaaatttttctttcaagtgcacttggttggtgcattgaatggcttcaagcttattttcttgtgctcgatgatattatggatagctctcatacgcgcagaggtcaaccctgttggttcagattacctaaggttggtatgattgccgtaaatgatggcatattacttcgcaaccatatcccaaggattctcaagaagcatttccgacaaaagccttactatgtggatctgttggatctatttaatgaggtagaattccagacagctagtggacagatgatagatttgatcaccacccttgtaggagagaaagacttatcgaaatactcattgcctattcatcgccggattgtgcagtacaaaactgcttactactcattttaccttccagtggcctgtgcacttcttatgtcaggcgaagatctggagaaacatactaatgtaaaggacatacttattgaaatgggaacctattttcaagtgcaggatgattatctggattgctttggtgcaccagaggtgattgggaagattggcacagatattgaagatttcaagtgctcctggttggtagtaaaagcactggaactttctaacgaggaacagaagaagtttttacatgagaactatggaaaggatgatccggcctctgtagcaaaagtgaaagagctttataacactctcaagcttcaggatgtatttgccgagtatgagagcaagagctatgacaagttgatcaaattcattgaagctcatccgagccaagccgtacaagcagtgttaaaatcattcttgggaaagatatataagcggcaaaagtaa

SEQ ID NO: 1066 - protein, 342 aa, Panax ginseng
MSDLKTRFLEVYSVLKSELLNDPAFEFTDDSRQWVERMLDYNVPGGKLNRGLSVIDSYKLLKEGKELSDDEIFLSSALGWCIEWLQAYFLVLDDIMDSSHTRRGQPCWFRLPKVGMIAVNDGILLRNHIPRILKKHFRQKPYYVDLLDLFNEVEFQTASGQMIDLITTLVGEKDLSKYSLPIHRRIVQYKTAYYSFYLPVACALLMSGEDLEKHTNVKDILIEMGTYFQVQDDYLDCFGAPEVIGKIGTDIEDFKCSWLVVKALELSNEEQKKFLHENYGKDDPASVAKVKELYNTLKLQDVFAEYESKSYDKLIKFIEAHPSQAVQAVLKSFLGKIYKRQK

SEQ ID NO: 1067 - DNA, 1032 bp, Panax notoginseng
  CDS (1)..(1032)
atgagcgatctgaagacgagatttctggaggtgtactctgttctgaaatccgagctactcaacgaccctgctttcgagttcaccgatgattctcgccaatgggtcgagcggatgctggactataatgtgcctggaggaaagctgaaccgagggctgtctgttattgacagctacaagttactgaaagaaggaaaagaactaagtgatgatgaaatttttctttcaagtgcacttggttggtgcattgaatggcttcaagcttattttctggtgcttgatgatattatggatagctctcatacgcgcagaggtcaaccctgttggttcagattacctaaggttggtatgattgccgtaaatgatggcatattacttcgcaaccatatcccaaggattctcaagaagcatttccgacaaaagccttactatgtggatctgttggatctatttaatgaggtagaattccagacagcttgtggacagatgatagatttgatcaccacccttgtaggagagaaagacttgtcgaaatactcattgcccattcatcgccggattgtgcagtacaaaactgcttactactcattttaccttccagtggcctgtgcacttcttatgtcaggtgaagatctggagaaacatttactagatgtaaaggacatacttattgaaatgggaacctattttcaagtgcaggatgattatctggattgctttggtgcacctgaggtgattggaaagattggcacagatattgaagatttcaagtgctcctggttggtagtaaaagcactggaactttctaacgaggaacaaaagaagtttttacatgagaactatggaaaggatgatccggcctctgtagcaaaagtgaaagagctttataacactctcaagcttcaggatgtatttgccgagtatgagagcaagagctatgacaagttgatcaaattcattgaagctcatccgagccaagcggtacaagcagtgttaaaatcattcttgggaaagatatataagcggcaaaagtaa

SEQ ID NO: 1068 - protein, 343 aa, Panax notoginseng
MSDLKTRFLEVYSVLKSELLNDPAFEFTDDSRQWVERMLDYNVPGGKLNRGLSVIDSYKLLKEGKELSDDEIFLSSALGWCIEWLQAYFLVLDDIMDSSHTRRGQPCWFRLPKVGMIAVNDGILLRNHIPRILKKHFRQKPYYVDLLDLFNEVEFQTACGQMIDLITTLVGEKDLSKYSLPIHRRIVQYKTAYYSFYLPVACALLMSGEDLEKHLLDVKDILIEMGTYFQVQDDYLDCFGAPEVIGKIGTDIEDFKCSWLVVKALELSNEEQKKFLHENYGKDDPASVAKVKELYNTLKLQDVFAEYESKSYDKLIKFIEAHPSQAVQAVLKSFLGKIYKRQK

SEQ ID NO: 1069 - DNA, 1026 bp, Vitis vinifera
  CDS (1)..(1026)
atgagcgagacgaagtccaaattcttggaggtgtactccgttttgaagtcggagcttctcaatgaccccgcttttgagttcactgacgattctcgccaatgggtcgagcgtatgttggactacaatgtacctggaggaaagctaaatcgagggctctctgttgttgacagctacaagttgctgcaaggcaggcaactgactgatgacgaagtttttcttgcatgtgtcctgggtttgtgcattgaatggcttcaagcatatttccttgtgcttgatgatattatggataactcgcatacacgtcgaggtcaaccttgctggttcagggttcccaaggttggtatgattgctgcgaatgatggggtgattcttcgcaatcaaatccctagaattctcaagaaccatttcaaaggaaagccatattatgtggatcttctggatttgtttaatgaggtggaatttcagacagcctcaggacagatgatagatttgatcacgactattgaaggagagaaagatctatcaaagtattcattgcctcttcaccgccgcattgttcagtacaaaactgcttattactcatttcaccttccagttgcatgtgcattgcttatggcaggcgaaaatttggacaatcacacttctgtaaaggacattcttgttcaaatgggaatctattttcaagtacaggatgattatctggattgtttcggtgacccccaagtgattggtaagatcggaacggatattgaagattttaagtgctcttggttgattgtgaaagcactagagatttgtaatgaggaacagaaaaaaaccttatatggaaactatgggaaagcagatccagccaatgttgcaaaagtgaaggcactttataaagacctcgatcttcagggtgtgtttctggagtatgagagcaaaagttatgagacgttagtgagctccatcgaagctcatccaagtaaggcagtacaagcagtgctgaaatcgttcttggggaagatttacaagagacagaagtag

SEQ ID NO: 1070 - protein, 341 aa, Vitis vinifera
MSETKSKFLEVYSVLKSELLNDPAFEFTDDSRQWVERMLDYNVPGGKLNRGLSVVDSYKLLQGRQLTDDEVFLACVLGLCIEWLQAYFLVLDDIMDNSHTRRGQPCWFRVPKVGMIAANDGVILRNQIPRILKNHFKGKPYYVDLLDLFNEVEFQTASGQMIDLITTIEGEKDLSKYSLPLHRRIVQYKTAYYSFHLPVACALLMAGENLDNHTSVKDILVQMGIYFQVQDDYLDCFGDPQVIGKIGTDIEDFKCSWLIVKALEICNEEQKKTLYGNYGKADPANVAKVKALYKDLDLQGVFLEYESKSYETLVSSIEAHPSKAVQAVLKSFLGKIYKRQK

SEQ ID NO: 1071 - DNA, 1029 bp, Centella asiatica
  CDS (1)..(1029)
atgagcgatctgaagaccaggtttctggaagtctactctgttcttaaatccgacctactcaacgaccctgctttcgaattcaccgacgattctcgccaatgggttgagcggatgctggactataatgtacctggaggaaagctaaatcgagggctatctgtcattgacagctataaattgctgaaagagggtaaagaattaagtgatgatgaaattgttctttcaagtgcacttggttggtgtattgaatggcttcaagcttattttcttgtgcttgatgatatcatggatggctctcatacacgcagaggtcaaccctgttggtttagaatacccaaggttggtatgattgctatcaatgatgggatattactacgcaaccatataccgaggattcttaagaagcatttccgacaaaagccttactacgtggatctgttggatctatttaatgaggtagagttccagacagcttgtggacagatgatagatttgatcaccacccttgtcggagagaaagacttgtcgaagtactcattgcctatccatcgtcggattgtgcagtacaaaacagcatattactcattttaccttccagtggcttgtgcacttcttatggctggagaggatctggagaaacatactaatgtaaaggacatactaattgaaatgggaacctactttcaagtgcaggatgattacttggattgctttggtgcgccagaggtgattggcaagattggaacagatattgaagatttcaagtgctcttggttggtagtaaaagctcttgaactctctaacgaggaacaaaagaagtgtttacacgagaactatgggaaggaggatcctgcctgtgtagcaaaaataaaggaactttataaagatctcaagcttcaggatgtatttgccgagtacgagagcaagagctatgagaagttgatcaaattcattgaagctcatccaaaccaatcagtacaggcagtgctcaagtcattcttggggaagatatacaagaggcaaaagtag

SEQ ID NO: 1072 - protein, 342 aa, Centella asiatica
MSDLKTRFLEVYSVLKSDLLNDPAFEFTDDSRQWVERMLDYNVPGGKLNRGLSVIDSYKLLKEGKELSDDEIVLSSALGWCIEWLQAYFLVLDDIMDGSHTRRGQPCWFRIPKVGMIAINDGILLRNHIPRILKKHFRQKPYYVDLLDLFNEVEFQTACGQMIDLITTLVGEKDLSKYSLPIHRRIVQYKTAYYSFYLPVACALLMAGEDLEKHTNVKDILIEMGTYFQVQDDYLDCFGAPEVIGKIGTDIEDFKCSWLVVKALELSNEEQKKCLHENYGKEDPACVAKIKELYKDLKLQDVFAEYESKSYEKLIKFIEAHPNQSVQAVLKSFLGKIYKRQK

SEQ ID NO: 1073 - DNA, 1173 bp, Ginkgo biloba
  CDS (1)..(1173)
atgcaattcccttctctcagaaaattgcattccatcttcagagtcgaagctctctattacggtattgggttgagtggcagagagtcgactagtaaagagtttcgatccttgcaccctgggtttgcagcaatggagtcgaactgcaatgctaacacgagatcaaagtttctcgaggtgtacaatgttctcaagtctcagattctgaacgattcggcttttcaatgtaccgatgacgctcgacagtggattgaaaagatgctggactacactgtacctggaggtaagctgaaccggggcctctctgtaattgacagttataggttattaaaaactggaaaggaaataacagaagatgaggtctttcttggatgtgttcttggctggtgcattgaatggcttcaagcctatttccttgtattagatgacattatggatgggtctcacactaggcgtggccaaccttgctggtttagactacctcaggttggcttaattgctgcgaatgatggaatattgctccgtacacacatatccagaattctaaaattgcattttcagactaagccttactatgtagatctttgtgatttgttcaatgaggtcgagttccaaacagcttctggtcagatgctggatctgatcactactcatgaaggggcaatagatcttgcaaagtacaaaatgccaacttatcttcgtattgttcagtataagactgcctactattcattctatctcccggttgcctgtgctttattaatggcaggggaaaatctggacaattttgtagctgtcaagaacattttagtgcagatgggaacctattttcaagtacaggatgattatcttgattgctttggtgatccagaagtgattgggaagattggaactgacattgaagacttcaagtgctcttggttgatagtgcaagcccttgaacgcgcaaatgagagccaacgtaaacagttatatgacaattatggaaaggcagatccttcttgtgttgcagcagttaaggcaatatatagggatcttggaattcaggatatttttctggagtacgagcgttctagccacaaggagctgatttcttccattgaggctcaagagaatgagtcagtgcagcttgtgttgaagtccttcctggggaagatatacaagcgacagaagtag

SEQ ID NO: 1074 - protein, 390 aa, Ginkgo biloba
MQFPSLRKLHSIFRVEALYYGIGLSGRESTSKEFRSLHPGFAAMESNCNANTRSKFLEVYNVLKSQILNDSAFQCTDDARQWIEKMLDYTVPGGKLNRGLSVIDSYRLLKTGKEITEDEVFLGCVLGWCIEWLQAYFLVLDDIMDGSHTRRGQPCWFRLPQVGLIAANDGILLRTHISRILKLHFQTKPYYVDLCDLFNEVEFQTASGQMLDLITTHEGAIDLAKYKMPTYLRIVQYKTAYYSFYLPVACALLMAGENLDNFVAVKNILVQMGTYFQVQDDYLDCFGDPEVIGKIGTDIEDFKCSWLIVQALERANESQRKQLYDNYGKADPSCVAAVKAIYRDLGIQDIFLEYERSSHKELISSIEAQENESVQLVLKSFLGKIYKRQK

SEQ ID NO: 1075 - DNA, 1146 bp, Lactarius chrysorrheus
  CDS (1)..(1146)
atggcccccattgcaacctcccccacatcttcttccgccccccttcctccagcagctgccaaggacaagaaggctgctgctcgcaaacgcttcgagggtgtgtacgctgtcgttcgcgatgacctccttgaggattttcgcaaacacaatatgcccgaggaggccattgagtactatcaacgcagcatggactacaatgtacctggtggaaagctcaaccgcggcatgagcgtcgtcgactccgtcgcgatcctcaagggtcgcgagcttaccgagtcggaatacttccaagccgccgtccttggttgggctgttgaatggatgcaagcctatttcctcgtctccgatgatattatggacgcgagcatcacccgtcgcggccagccctgctggtatcgtaccgagggtgtcggcttcatggccattaacgacgcgctcattctggaaggggcgatcttccaaatgatccgcaagcacttccgcaaggagccattttacgttgaccttattgaccttctgcacgaggtctcgtatcaaacggaaatgggccaacttgttgacctgatcaccgctccagaacacagcgtagatttgtccaagttctctctctccaggcacagcaccatcgtcatctacaagacggcttactactccttctatctccctgtcgctctctcactactcctctgcggcttccccgccgagaagcagaacgagacagatccagacttctacaagattgcgctggacatcctcgtcccactcggcgagtacttccagatccaggatgactacctcgactactccgggacaccggagcagattggcaagatcggcacggacatcgtggacaacaagtgctcgtggtgcatcaacacggccctcgcgcgtgccaatcccgcacagcgcgcgatcctcgacgccaactacgggcggaaggaccccgaggcggaggcacgcgtcaagaccgtcttcgtcgagctcggtgtcgacgcggtgtatgcggagtacgaagcggcatcgtatgagcgcatcaacgcgctcatcgacgcggttccagaggtgccatgcccgaacggcgacgctgtactccgccgtgctgtcttcaggacattcctggagaagatttacaagcgcaccaagtag

SEQ ID NO: 1076 - protein, 381 aa, Lactarius chrysorrheus
MAPIATSPTSSSAPLPPAAAKDKKAAARKRFEGVYAVVRDDLLEDFRKHNMPEEAIEYYQRSMDYNVPGGKLNRGMSVVDSVAILKGRELTESEYFQAAVLGWAVEWMQAYFLVSDDIMDASITRRGQPCWYRTEGVGFMAINDALILEGAIFQMIRKHFRKEPFYVDLIDLLHEVSYQTEMGQLVDLITAPEHSVDLSKFSLSRHSTIVIYKTAYYSFYLPVALSLLLCGFPAEKQNETDPDFYKIALDILVPLGEYFQIQDDYLDYSGTPEQIGKIGTDIVDNKCSWCINTALARANPAQRAILDANYGRKDPEAEARVKTVFVELGVDAVYAEYEAASYERINALIDAVPEVPCPNGDAVLRRAVFRTFLEKIYKRTK

SEQ ID NO: 1077 - DNA, 1185 bp, Artemisia tridentata
  Artemisia tridentata subsp
  CDS (1)..(1185)
atggcatcctttattagtctttcttccaaatcggcttcttggaatgcctcttcttgtccgcacccatcagttcaaccttttgtgactcggaagaatgtggtacggtatcataaaccaacttcttctgagcccagctattctccgctcactacaacattgagcagcaatctgaactcacaattcatgcaagtttacgagactttgaaatcggagctaattcacgacccgttatttgagtttgatgacgattctcgtcagtgggtggagcggatgatcgactacactgtacctggaggaaagatggtccgaggctattctgttgttgacagctaccaattgcttaaaggagaagaattgacagaagaagaagcttttctcgcatgtgctcttggttggtgcactgaatggtttcaagcatttattcttctacatgatgacatgatggatggctcgcacacacggagaggtcaaccctgttggttcagactacccgaggttggagcagttgctataaatgatggtgttcttcttcgcaaccatgtccacagaatcctaaagaaacacttccaaggaaaggcttattacgtgcatcttgtggacctcttcaatgagaccgaatttcaaacaatctctggacaaatgattgatacgatctctagactagctggacagaaagagctctcaaagtattctatgtctcttaaccgtcggattgttcagtacaaaggtgcttactactcatgttaccttccaattgcgtgtgcactccttatgtttggagagaatctggatgattatgttcaagtgaaagacatccttgtagaattgggtatgtattatcaaattcagaatgattatctcgacactttcggcgatcctaatgtttttggcaagactggaacagatattgaagaatgcaagtgttcatggttgattgcgaaagcactggaacttgccaatgaggaacaaaagaaaattttaagcgaaaactatgggataaaagatccagcaaaggtagcaaaagtgaaggaaatataccatgctctcaatctaaagggtgcgtatgaagattatgagacaaatctgtatgagaattcgatgaaagcaattaaagctcatccaagcattgcagtgcaagcggtgttgaaatcttgtctggaaaagatgtataagggacataagtaa

SEQ ID NO: 1078 - protein, 394 aa, Artemisia tridentata
  Artemisia tridentata subsp
MASFISLSSKSASWNASSCPHPSVQPFVTRKNVVRYHKPTSSEPSYSPLTTTLSSNLNSQFMQVYETLKSELIHDPLFEFDDDSRQWVERMIDYTVPGGKMVRGYSVVDSYQLLKGEELTEEEAFLACALGWCTEWFQAFILLHDDMMDGSHTRRGQPCWFRLPEVGAVAINDGVLLRNHVHRILKKHFQGKAYYVHLVDLFNETEFQTISGQMIDTISRLAGQKELSKYSMSLNRRIVQYKGAYYSCYLPIACALLMFGENLDDYVQVKDILVELGMYYQIQNDYLDTFGDPNVFGKTGTDIEECKCSWLIAKALELANEEQKKILSENYGIKDPAKVAKVKEIYHALNLKGAYEDYETNLYENSMKAIKAHPSIAVQAVLKSCLEKMYKGHK

SEQ ID NO: 1079 - DNA, 1041 bp, Artemisia tridentata
  Artemisia tridentata subsp
  CDS (1)..(1041)
atgagtagtagtaaaagtatcgatctcaaatcaaagtttttaaaagtctatgatacacttaaatcagaccttattaacgaccccgccttcgaatttgacgatgattcccgtcaatggattcaaaagatgcttgactacaatgtacctggaggaaagctgaaccggggattatctgttgtcgacagttatcagctgcttaaaggaggagaactgtctgatgacgagatttttctttcatctgcccttggttggtgtattgaatggcttcaagcgtactttctggtgcttgatgatatcatggacgagtctcatacacgcagagggcaaccctgttggtttagattacccaaggttggtatgattgctgcgaacgatgggattcttcttcgcaaccatgtcccgagaattcttaagaaacatttccgaggaaagccttactatgtggatctcgtggacctgttcaacgaggttgaattccaaacagcctctggtcagatgattgatttgatcactacacttgttggagagaaagatctctcgaagtattcattgtctattcaccgccggattgttcaatacaaaacagcttactactcattttaccttccagttgcctgtgcactccttatgtttggagaggatcttgacaagcacgttgaagtgaagaacgtactcgttgaaatgggtacctattttcaagttcaggacgattatctagactgttttggtgctcccgaggtgattggaaagattggaaccgatattgaagactttaagtgctcctggttagttgtcaaagcattggaactcgccaatgaggaacaaaagaaaaccctacatgagaactatgggaaaaaagaccccgcgtctgttgctaaagttaaggaagtataccacactctcaatcttcaggctgtatttgaggattacgaggccacaagttacaagaagctgatcacatcgattgaaaatcacccaagcaaagcagtccaagcggtgttgaaatccttcttgggtaaaatctacaagaggcaaaagtag

SEQ ID NO: 1080 - protein, 346 aa, Artemisia tridentata
  Artemisia tridentata subsp
MSSSKSIDLKSKFLKVYDTLKSDLINDPAFEFDDDSRQWIQKMLDYNVPGGKLNRGLSVVDSYQLLKGGELSDDEIFLSSALGWCIEWLQAYFLVLDDIMDESHTRRGQPCWFRLPKVGMIAANDGILLRNHVPRILKKHFRGKPYYVDLVDLFNEVEFQTASGQMIDLITTLVGEKDLSKYSLSIHRRIVQYKTAYYSFYLPVACALLMFGEDLDKHVEVKNVLVEMGTYFQVQDDYLDCFGAPEVIGKIGTDIEDFKCSWLVVKALELANEEQKKTLHENYGKKDPASVAKVKEVYHTLNLQAVFEDYEATSYKKLITSIENHPSKAVQAVLKSFLGKIYKRQK

SEQ ID NO: 1081 - DNA, 1029 bp, Artemisia tridentata
  Artemisia tridentata subsp
  CDS (1)..(1029)
atgagcattgatctcaagtctaggttcctacaagtttacgactcccttaaatcagatctaatacatgatccagcattcgagtttgacgatgattctcgtaactgggtcgaacgtatgcttgactacaacgtacctggagggaagttgaacagaggcctttcggttgtggacagttacaagttgcttaaacaagaagaactaaccgaagatgaagtttttctcgcatgtgcccttggttggtgcattgaatggcttcaagcatattttcttgtactcgatgacattatggatgagtcccatacacgcagaggtcagccctgttggttcagattacccaaggttggtatgattgctgtaaatgatggagttgttcttcgcaaccatatcccaagaatcctaaagaaacatttccgagggaaggcttattatgctgatctactagacctcttcaacgaggtagaatttcaaacagcctctggacagatgattgatttaatcacgacactttttggacagaaagagctctcgaagtattctttgtctactcaccagcgaattgttaagttcaaaactgcttattactcattttaccttccggttgcgtgtgcactccttatgtttggtgagaatttggacgatcatgttcaagtgaaagacgttcttgttgaaatgggtacctattttcaagtgcaggatgattatctcgattgttttggctctcctgaggtgattggtaagattggaacagatattgaagacttcaagtgttcttggttggttgtgaaagctttggaacttgccgatgaacaacaaaagaaacttctgaatgagaactatggcagaaaggacccggccagtgtagcaaaagtgaaagaactttaccacactctcaaccttcagggtgtgtttgaagattacgagaataagagtcacgagaaaataatcaagtcgattgaaactcacccaagtaaagcagtacaagaagtgttgaaatctttcttgggaaaaatatttaagaggcaaaagtag

SEQ ID NO: 1082 - protein, 342 aa, Artemisia tridentata
  Artemisia tridentata subsp
MSIDLKSRFLQVYDSLKSDLIHDPAFEFDDDSRNWVERMLDYNVPGGKLNRGLSVVDSYKLLKQEELTEDEVFLACALGWCIEWLQAYFLVLDDIMDESHTRRGQPCWFRLPKVGMIAVNDGVVLRNHIPRILKKHFRGKAYYADLLDLFNEVEFQTASGQMIDLITTLFGQKELSKYSLSTHQRIVKFKTAYYSFYLPVACALLMFGENLDDHVQVKDVLVEMGTYFQVQDDYLDCFGSPEVIGKIGTDIEDFKCSWLVVKALELADEQQKKLLNENYGRKDPASVAKVKELYHTLNLQGVFEDYENKSHEKIIKSIETHPSKAVQEVLKSFLGKIFKRQK

SEQ ID NO: 1083 - DNA, 960 bp, Eucommia ulmoides
  CDS (1)..(960)
atggcggaactgaagaaagaatttcttaacgtctactcggtgctgaaaaaggagttgctccatgacccagccttcagcctcactgaagattctcgcaattgggtcgaacggatgttggactacaatgtacccggaggaaaactgaatagaggactttccgtggtggacagctacaagcttctgaaggaactgtcaagttcaaagaaaggagctcaactcactgagagcgaaatatttcattcatctgtgttgggttggtgcgttgagtggcttcaagcttgtgcgcttgttctcgacgatattatggacagctcacacacacgccgaggtcaaatgtgttggtacaaactccccaaggttggtatgattgctattaacgatgggcttatacttcgcaatcatgtgccgaggattctcaagaaacattttcgatccaagccttactatctcgaattgttggatttatttcacgaggtggaatgtcagactgttggtggacaaatgattgatttgattactacacttgtaggagagattgatctatctgagtactcattacctacccatcgtcaaattactgtctcaaaaacctcttattactcgttctaccttccggtggcttgtgcacttctaatgaccggcgagaaattggaaagccacagtggcatgaaggacatacttatcgaaatgggaagctattttcaagtccaggatgattacctggattgttttggtgatcctgaggtgattggaaagattggatcagatattgaagattttaagtgcacttggttagtcgtaaaagcattggaactttgtaacgaagaacaaaagaagattttatatgataactatggaaaaaaagacccagaatctgttgctagagtgaaggatctttataaaactctcaagcttcaggacgtgttcgaggagacgagaaaaagacgcacgagaagctaa

SEQ ID NO: 1084 - protein, 319 aa, Eucommia ulmoides
MAELKKEFLNVYSVLKKELLHDPAFSLTEDSRNWVERMLDYNVPGGKLNRGLSVVDSYKLLKELSSSKKGAQLTESEIFHSSVLGWCVEWLQACALVLDDIMDSSHTRRGQMCWYKLPKVGMIAINDGLILRNHVPRILKKHFRSKPYYLELLDLFHEVECQTVGGQMIDLITTLVGEIDLSEYSLPTHRQITVSKTSYYSFYLPVACALLMTGEKLESHSGMKDILIEMGSYFQVQDDYLDCFGDPEVIGKIGSDIEDFKCTWLVVKALELCNEEQKKILYDNYGKKDPESVARVKDLYKTLKLQDVFEETRKRRTRS

SEQ ID NO: 1085 - DNA, 1029 bp, Hevea brasiliensis
  CDS (1)..(1029)
atggcggatctgaagtcaactttcttgaaggtctactctgtcctcaagcaggagctccttgaggatccggctttcgaatggacaccagattcccgtcaatgggttgagcggatgttggactacaatgtgcctggagggaagctgaatagggggctttctgtaattgacagctacaaattgttgaaagaaggacaggaattaacagaagaagagatctttcttgcaagtgctcttggttggtgtattgaatggcttcaagcctattttcttgtacttgatgacattatggatagctctcatacacgacgtggtcagccttgctggtttagggtgcccaaggttggtctgattgcagcaaatgatgggattttgcttcgcaatcacattcccaggattcttaaaaagcacttccgagggaaggcatactatgtagatcttctagatttgtttaatgaggtggagtttcaaacagcctcaggacagatgatagatctaattacaacacttgaaggagaaaaggatttatccaaatacactttgtcactccaccggagaattgttcagtacaaaactgcctactactcattttaccttcctgttgcttgtgcattgctcatagcgggtgagaatctggacaatcatattgttgtaaaagacattcttgttcagatgggaatctacttccaagtacaggatgattatttggattgctttggtgatcccgagacaattggtaagataggaacagatatagaagattttaagtgttcatggttggtcgtgaaggctttagaactttgcaatgaagaacaaaagaaagtgttatatgagcactatgggaaagctgacccagccagtgtagcaaaggtgaaggtcctttataatgagctgaagcttcagggggtatttacggagtatgagaatgaaagctataagaaactagtaacctctattgaagctcatcctagcaagccggtgcaagcagtgttgaagtcctttttggccaaaatttacaagagacagaaataa

SEQ ID NO: 1086 - protein, 342 aa, Hevea brasiliensis
MADLKSTFLKVYSVLKQELLEDPAFEWTPDSRQWVERMLDYNVPGGKLNRGLSVIDSYKLLKEGQELTEEEIFLASALGWCIEWLQAYFLVLDDIMDSSHTRRGQPCWFRVPKVGLIAANDGILLRNHIPRILKKHFRGKAYYVDLLDLFNEVEFQTASGQMIDLITTLEGEKDLSKYTLSLHRRIVQYKTAYYSFYLPVACALLIAGENLDNHIVVKDILVQMGIYFQVQDDYLDCFGDPETIGKIGTDIEDFKCSWLVVKALELCNEEQKKVLYEHYGKADPASVAKVKVLYNELKLQGVFTEYENESYKKLVTSIEAHPSKPVQAVLKSFLAKIYKRQK

SEQ ID NO: 1087 - DNA, 1059 bp, Mucor circinelloides
  Mucor circinelloides f
  CDS (1)..(1059)
atggttgctgtcaaattacaaaaggaagaaaacagacaagctttcctcaaggttttccccactcttgctgatgaggtgcttttggagcttcgcaaatacaacatgcctgaagatgcttatgaatggacaaagaagatgttgtattacaatgtgcccggtggcaagttgaaccgtggtatctctgttgttgataccgtccgtatcttgaagggtgatgctgttactgaggacgacatcttcaaggctactgttttgggttggttgattgaattccttcaagccttctttttggtttccgatgatatcatggatgcttccatcactcgccgtggtcaaccttgttggtacaagagcgagggtgttggtatggttgctatcaacgacgcgttcatccttgaatcttgcatctacatcttcttgaaaaagtacttcaagaagaccgattattacatcgaactcgtagaattgttccatgaagttactttccaaactgaactcggccaactctgtgatcttatcactgctcctgaggatgatgttgatttgagcaagttctctatcaagaagcatcaattcattgtcatctacaagaccgcctactactccttctatctccctgttgctttagccatgcatatggtcggcatcaagaatgaggaagccttcaagcaatctcacgatattttgattcccttgggtgaatacttccaagttcaagacgattatctcgactgttacggtgctcctgaggtcattggtaagattggtaccgatatcatggacaacaagtgctcctggttgatcaaccaagctttggctttggctaatcccgaacaacgcaagatccttgacgaaaactatggccaaaagaacgctgaatctgaagccaaggtcaagcaactttacctcgatctcaacatcgagtctgtatacaaggcttacgaagagaagtctttcaatgatttgaatgccttgattgagaaattagacgaatctgtcggtgtcaagaagatgattttcactgaattcatggataagatttacaagcgtactaaataa

SEQ ID NO: 1088 - protein, 352 aa, Mucor circinelloides
  Mucor circinelloides f
MVAVKLQKEENRQAFLKVFPTLADEVLLELRKYNMPEDAYEWTKKMLYYNVPGGKLNRGISVVDTVRILKGDAVTEDDIFKATVLGWLIEFLQAFFLVSDDIMDASITRRGQPCWYKSEGVGMVAINDAFILESCIYIFLKKYFKKTDYYIELVELFHEVTFQTELGQLCDLITAPEDDVDLSKFSIKKHQFIVIYKTAYYSFYLPVALAMHMVGIKNEEAFKQSHDILIPLGEYFQVQDDYLDCYGAPEVIGKIGTDIMDNKCSWLINQALALANPEQRKILDENYGQKNAESEAKVKQLYLDLNIESVYKAYEEKSFNDLNALIEKLDESVGVKKMIFTEFMDKIYKRTK

SEQ ID NO: 1089 - DNA, 1029 bp, Malus domestica
  CDS (1)..(1029)
atggcggatctcaagtcaaagtttctgaaggtgtactccgttctgaaatcggagctgttggaagaccctgctttcgacttcaccaatgactctcgccaatgggttgagcggatgctggactacaatgtgcctggagggaagcttaatcggggattgtctgttattgacagctatcagttgttgcaacaaggaagggaattaactgaagatgaaatcttcctggccagcgctctcggttggtgcatcgaatggcttcaagcattttttctggttcttgatgacatcatggatggctctcacacacgtcgtggtcagccttgctggtttagattgcccaaggttggtatgattgcagtaaatgatggtgttgtgcttcgaaaccatatcccaaggattctcagaaagtacttcagagaaaagccatattacgtggatcttcttgatttgttcaatgaggtggaatttcaaactgcctcaggtcagatgatagatttgatcactactatcgaaggagaaaaagatctatccaaatactcattgtcaattcaccgccgtattgttcagtacaagactgcctattactcattttacctttccgttgcatgtgcattgcttatgtcaggtgaggaactggaaaaacatattgatgtaaaaaacattcttgttgagatggggatctactttcaagtacaggatgattatttggattgctttggtgatccggaaacgattggtaagataggaacagatattgaagatttcaagtgctcttggttggtggtgaaagctttggaactctgcaatgaggaacaaaagaaagtactacatgagaattatgggaaaccagacccagaaaatgtggcaacagtaaaggccctctacaaagaactcgatattgagggtgtatttgcggattatgagagcaaaagctacaagaaactgacgagttggattgaagggcacccaagcaaagcggtgcaatcagtgttgaagtccttcttgggcaagatttacaagaggcagaaatag

SEQ ID NO: 1090 - protein, 342 aa, Malus domestica
MADLKSKFLKVYSVLKSELLEDPAFDFTNDSRQWVERMLDYNVPGGKLNRGLSVIDSYQLLQQGRELTEDEIFLASALGWCIEWLQAFFLVLDDIMDGSHTRRGQPCWFRLPKVGMIAVNDGVVLRNHIPRILRKYFREKPYYVDLLDLFNEVEFQTASGQMIDLITTIEGEKDLSKYSLSIHRRIVQYKTAYYSFYLSVACALLMSGEELEKHIDVKNILVEMGIYFQVQDDYLDCFGDPETIGKIGTDIEDFKCSWLVVKALELCNEEQKKVLHENYGKPDPENVATVKALYKELDIEGVFADYESKSYKKLTSWIEGHPSKAVQSVLKSFLGKIYKRQK

SEQ ID NO: 1091 - DNA, 1074 bp, Musa acuminata
  CDS (1)..(1074)
  misc_feature (690)..(690): n is a, g, c or t
atggcggcggcagggaccaatggcgcggtggtggtcgtcgtcggagaaggggatctgaaggcgaccttccgccagatctacgatcgcctcaagtcggagctgctccaagatgacgccttcgattgcaccgacgaggcccgccaatggatcgacaggatgctggactacaatgtacctggaggcaagctaaaccgtggattgtctgtcatcgatagctacaagttgcttaaggaagggaatcaactcaatgatgaagaggtctttctaggatgtgccctcggttggtgcattgaatggcttcaagcatattttctagtccttgatgatatcatggataactcgcacactaggcgaggtcaactttgttggtttagagttccaaaggttggacttattgctgtaaatgatggaattctactccgcaatcacattcctcggattcttaaaaggcattttaagggaaagccttactatgtagatctccttgatttgttcaatgaggttgaatttcagacagcttcagggcagatgcttgatctcattactactcatgaaggagaaaaggatctgtctaaatatacactgccagtttacaatcgtatcgtgcaatacaaaactgcctattattccttttatcttccagtagcatgtgcactgctaatggcaggtgaaaatttggacacctttgtngatgtgaaaaacattcttgttgaaatgggtacatacttccaagtgcaggatgatttcctagattgttttggtgatcctgaagtgattggtaagattggaaccgacattgaagattttaaatgttcttggcttgtagtgcaagccctacaacgcgctaatgagaatcagatgaaaactttgtcggagatctatggaaagtctgatccaacttgtgttgcaaaagtgaagagtatttataaagatctcgatctccagaatgtatttgccgagtacgagcggaccagttatgaacaactgatatcttcaattgaggcccagccaagcaaagcagttcagggtgtactgaagtctttcctgcagaagatctacaagagggagaaatag

SEQ ID NO: 1092 - protein, 357 aa, Musa acuminata
MAAAGTNGAVVVVVGEGDLKATFRQIYDRLKSELLQDDAFDCTDEARQWIDRMLDYNVPGGKLNRGLSVIDSYKLLKEGNQLNDEEVFLGCALGWCIEWLQAYFLVLDDIMDNSHTRRGQLCWFRVPKVGLIAVNDGILLRNHIPRILKRHFKGKPYYVDLLDLFNEVEFQTASGQMLDLITTHEGEKDLSKYTLPVYNRIVQYKTAYYSFYLPVACALLMAGENLDTFVDVKNILVEMGTYFQVQDDFLDCFGDPEVIGKIGTDIEDFKCSWLVVQALQRANENQMKTLSEIYGKSDPTCVAKVKSIYKDLDLQNVFAEYERTSYEQLISSIEAQPSKAVQGVLKSFLQKIYKREK

SEQ ID NO: 1093 - DNA, 1026 bp, x Citrofortunella mitis
  CDS (1)..(1026)
atgagtgatctgaagtcaagattcattgatgtgtatggcgttttgaaacaagagctgctgtatgatcctgcatttgagttcgatcacgattctcgccaatgggttgatcgtatgctggattacaatgtacctggagggaagctgaaccgagggctatctgttgttgacagctacaggttactgaaagaaggaaagactacagatgatgaattctttctctcatctgcactaggctggtgcatcgaatggcttcaagcatattttcttgttcttgatgatatcatggatggctctcatacacgccgtggtcaaccttgctggttcagagtccccaaggttggtatgattgctgcaaatgatggtgtattactacgcaaccatatctccagaattctcaagaatcattttagagacaagccttattacgtggacctgttggatttatttaatgaggtggaatttcaaacagcttcaggacaaatgatagacttaattaccacaatcgaaggagagaaagatctatcgaagtactcattgccacttcatcgtcgcattgttcagtacaaaactgcttactattcattttaccttccagttgcttgtgcattacttatggcaggtgagaatcttgacaaacatgttgaggtcaaggacatcttagttcaaatgggtatctattttcaagtacaggatgattttctggattgttttggttctcctgaagttattggcaaggttggaactgatattgaagattacaagtgttcttggttggttgtaaaagctctggaactttgtaacgaggaacaaaagaatgtggtccatgagaactatggaaaggtagatccagcctgcgttgcaaaagtgaaagagctttataaaactcttgatcttgagggcgcatttgtggagtatgagaaagagagttatgaaaagctgacaaaatccattgaagctcatcctactaaggaagttcaagccgtgctaaaatcattcttggcaaagatatacaagagacagaagtga

SEQ ID NO: 1094 - protein, 341 aa, x Citrofortunella mitis
MSDLKSRFIDVYGVLKQELLYDPAFEFDHDSRQWVDRMLDYNVPGGKLNRGLSVVDSYRLLKEGKTTDDEFFLSSALGWCIEWLQAYFLVLDDIMDGSHTRRGQPCWFRVPKVGMIAANDGVLLRNHISRILKNHFRDKPYYVDLLDLFNEVEFQTASGQMIDLITTIEGEKDLSKYSLPLHRRIVQYKTAYYSFYLPVACALLMAGENLDKHVEVKDILVQMGIYFQVQDDFLDCFGSPEVIGKVGTDIEDYKCSWLVVKALELCNEEQKNVVHENYGKVDPACVAKVKELYKTLDLEGAFVEYEKESYEKLTKSIEAHPTKEVQAVLKSFLAKIYKRQK

SEQ ID NO: 1095 - DNA, 1050 bp, Mentha piperita
  CDS (1)..(1050)
atggcgaatctcaacggagcggcgtcggatctgaggaagacgtttctgggggtttattctacgctgaaatctgagctcttgaatgaccctgctttcgagtggactgatggctctcgccaatgggtcgagcgtatgttggactacaatgtacctggagggaagttaaaccgaggcttgtcagttattgatagctaccagttactgaaagaaggaaaagatctaactgatgatgaagtgtttctagctagcgctcttggctggtgtattgaatggcttcaggcatattttcttgtccttgacgatataatggataattctcacacacgacgtggtcagccatgctggtttaaagttcccaaggttggtatgattgccataaatgatggaatcattctcagaaaccatatccccagaattctgaagaagcacttcagatcaaagccttactatgtagatctgctggatctgttcaatgaggtggagtttcaaactgcctctggacagatgatagatttaattactactattgaaggagaaaaagatttgtcaaaatactccttgcctcttcatcgccgcattgttcagtacaagactgcctactactcattttaccttccagttgcttgtgcattgctcatggcgggtgagaacctggagaaccatccaactgtaaaagatgtgcttatcgatatgggaatatactttcaagtacaggatgactacttagattgcttcggtgagcccgaaaagattgggaagattggaacagatattgaagatttcaaatgttcttggctggttgtaaaggccctagagctttgcaatgaagaacaaaagaaaactcttttcgaacattatggaaaagaaaatccagctgatgttgctaaaatcaaagccctctacaatgacatcaatctccaaggcatgtttgctgatttcgagagcaagagctacgagaaaataacaagctccatcgaagctcatcccagcaaatctgtgcaagcagtgctcaagtctttcttgggaaagatatacaagaggcagaaataa

SEQ ID NO: 1096 - protein, 349 aa, Mentha piperita
MANLNGAASDLRKTFLGVYSTLKSELLNDPAFEWTDGSRQWVERMLDYNVPGGKLNRGLSVIDSYQLLKEGKDLTDDEVFLASALGWCIEWLQAYFLVLDDIMDNSHTRRGQPCWFKVPKVGMIAINDGIILRNHIPRILKKHFRSKPYYVDLLDLFNEVEFQTASGQMIDLITTIEGEKDLSKYSLPLHRRIVQYKTAYYSFYLPVACALLMAGENLENHPTVKDVLIDMGIYFQVQDDYLDCFGEPEKIGKIGTDIEDFKCSWLVVKALELCNEEQKKTLFEHYGKENPADVAKIKALYNDINLQGMFADFESKSYEKITSSIEAHPSKSVQAVLKSFLGKIYKRQK

SEQ ID NO: 1097 - DNA, 1029 bp, Humulus lupulus
  CDS (1)..(1029)
atgagtggtttaaggttaaaattcatggaggtttactccattttgaaatcagagcttctcaacgatcctgctttcgagttcaccgatgattctcgccaatgggtcgaacggatgctggattacaatgtcccaggaggtaagcttaatcgtgggttgtcagttattgatagttaccaattacttaaaggaggaaaggaactaactgaagaagaaatttttctaacttctgctcttggttggtgtattgaatggcttcaagcatattttttggttcttgatgatatcatggataactctgttacacgtcgcggtcaaccctgctggtttagagtaccaaaggttggattgattgctgcaaacgatggcattctacttcgaaaccatattccgagaattcttaagaagcatttcaaggggaagagctactatgtggatcttcttgatttgtttaatgaggtggaattccaaacagcctcgggacaaatgattgatttgatcaccacaattgaaggagagaaagatctttcaaaatactcaattccacttcaccatcgcattgttcagtacaagactgcttactactcattctaccttccggttgcttgtgcattggtgatggctggtgaaaatcttgataaccatgttgatgtgaagaacgttcttattgaaatgggaacctatttccaagtacaggatgactatttggattgttttggccacccagatgtaattggcacgattggtacagatattgaagacttcaagtgctcttggttggttgtgaaagcactcgaaatagctaccgaggaacaaaagaagatgctatttgagcattatggtaagggagatgaagcatctgtcaaaaaagtgaaagagttatacaaggcccttgatcttgagggcgtgtttgcggattacgagaatgctagttaccaaaagcttataaaatcgatcgaagctcatccgaaagaagaagttcaggcagtgctcaaatctttcttggctaagatctacaagaggcagaagtaa

SEQ ID NO: 1098 - protein, 342 aa, Humulus lupulus
MSGLRLKFMEVYSILKSELLNDPAFEFTDDSRQWVERMLDYNVPGGKLNRGLSVIDSYQLLKGGKELTEEEIFLTSALGWCIEWLQAYFLVLDDIMDNSVTRRGQPCWFRVPKVGLIAANDGILLRNHIPRILKKHFKGKSYYVDLLDLFNEVEFQTASGQMIDLITTIEGEKDLSKYSIPLHHRIVQYKTAYYSFYLPVACALVMAGENLDNHVDVKNVLIEMGTYFQVQDDYLDCFGHPDVIGTIGTDIEDFKCSWLVVKALEIATEEQKKMLFEHYGKGDEASVKKVKELYKALDLEGVFADYENASYQKLIKSIEAHPKEEVQAVLKSFLAKIYKRQK

SEQ ID NO: 1099 - DNA, 1029 bp, Eucommia ulmoides
  CDS (1)..(1029)
atgagcgatctgaagtcgaaatttctggaggtgtattccgttctgaaatcggagttgctcaacgaccctgcgttcgatttcaccgatgattctcgtctatgggttgagcggatgctggattataacgtgcccggaggaaagctgaatcgtgggctttcagtaattgatagcttcaagttgctgaaagaaggaaaagagccaactgatgaggaaattttccttgcttgtgttcttggttggtgcatagaatggcttcaagcgtattttcttgttcttgatgacattatggatagctcccatacacgccgaggccaaccatgttggttcagattgccaaaggtcggtatgattgcagtgaacgatggactaatacttcgcaaccatatcccaagaattcttaaaaagcatttcaaaggaaagccttattatgtggatttgctcgatttattcaacgaggtagaattccagacagcctctggacagatgatagacttaatcaccacacttgtaggagagaaggatctatcaaagtactcattgcctctccaccatcggattgtccagtacaagacggcttactactctttttaccttccagtggcttgtgcacttgtaatgtctggggagaatctggataaccatgttgatgtaaagaacatacttgtcgaaatgggaacctatttccaagttcaggacgattatctcgactgtttcggtgatccaaagtttatcggaaagattggaaccgacatcgaagatttcaagtgttcttggttggttgttaaagcgctcgaactcgctaacgatgaacaaaagaagctgttacatgagaattatgggaaagaagatccagaatgtgtagcaaaagtgaaaaagctttatgaaactctcaaccttcaggacgtgtttggcgagtacgaaaggcagagtcatgggaagctgataaaggcgatagaaggtcattcgaataaagcagtacagtttgtgttgaaatcctccttggagaagatctatcagaggcagaaatag

SEQ ID NO: 1100 - protein, 342 aa, Eucommia ulmoides
MSDLKSKFLEVYSVLKSELLNDPAFDFTDDSRLWVERMLDYNVPGGKLNRGLSVIDSFKLLKEGKEPTDEEIFLACVLGWCIEWLQAYFLVLDDIMDSSHTRRGQPCWFRLPKVGMIAVNDGLILRNHIPRILKKHFKGKPYYVDLLDLFNEVEFQTASGQMIDLITTLVGEKDLSKYSLPLHHRIVQYKTAYYSFYLPVACALVMSGENLDNHVDVKNILVEMGTYFQVQDDYLDCFGDPKFIGKIGTDIEDFKCSWLVVKALELANDEQKKLLHENYGKEDPECVAKVKKLYETLNLQDVFGEYERQSHGKLIKAIEGHSNKAVQFVLKSSLEKIYQRQK

SEQ ID NO: 1101 - DNA, 918 bp, Eucommia ulmoides
  CDS (1)..(918)
atgttggactacaatgtacccggaggaaaactgaatagaggactttccgtggtggacagctacaagcttctgaaggaactgtcaagttcaaagaaaggagctcaactcactgagagcgaaatatttcattcatctgtgttgggttggtgcattgagtggcttcaagcttgtgcgcttgttctcgacgatattatggacagctcacacacacgccgaggtcaaatgtgttggtacaaactccccaaggttggtatgattgctattaacgatgggcttatacttcgcaatcatgtgccgaggattctcaagaaacattttcgatccaagccttactatctcgaattgttggatttatttcacgaggtggaatgtcagactgttggtggacaaatgattgatttgattactacacttgtaggagagattgatctatctgagtactcattacctacccatcgtcaaattactgtctcaaaaacctcttattactcgttctaccttccggtggcttgtgcacttctaatgaccggcgagaaattggaaagccacagtggcatgaaggacatacttatcgaaatccaggatgattacctggattgttttggtgatcctgaggtgattggaaagattggatcagatattgaagattttaagtgcacttggttagtcgtaaaagcattggaactttgtaacgaagaacaaaagaagattttatatgataactatggaaaaaaagacccagaatctgttgctagagtgaaggatctttataaaactctcaagcttcaggacgtgttcgaggagtacgagaaaaagacgcacgagaagctaaacaagtcgattgatgcttatccaagtaaagcagtgcaagcagttctacaatcattcttggctaagattcacaggaggctcaagtag

SEQ ID NO: 1102 - protein, 305 aa, Eucommia ulmoides
MLDYNVPGGKLNRGLSVVDSYKLLKELSSSKKGAQLTESEIFHSSVLGWCIEWLQACALVLDDIMDSSHTRRGQMCWYKLPKVGMIAINDGLILRNHVPRILKKHFRSKPYYLELLDLFHEVECQTVGGQMIDLITTLVGEIDLSEYSLPTHRQITVSKTSYYSFYLPVACALLMTGEKLESHSGMKDILIEIQDDYLDCFGDPEVIGKIGSDIEDFKCTWLVVKALELCNEEQKKILYDNYGKKDPESVARVKDLYKTLKLQDVFEEYEKKTHEKLNKSIDAYPSKAVQAVLQSFLAKIHRRLK

SEQ ID NO: 1103 - DNA, 1029 bp, Humulus lupulus
  CDS (1)..(1029)
atgagtggtttaaggtcaaaattcatggaggtttactccattttgaaatcagagcttctcaacgatcctgctttcgagttcaccgatgattctcgccaatgggtcgaacggatgctggattacaatgtcccaggaggtaagcttaatcgtgggttgtcagttattgatagttaccaattacttaaaggaggaaaggaactaactgaagaagaaatttttctaacttctgctcttggttggtgtattgaatggcttcaagcatattttttggttcttgatgatatcatggataactctgttacacgtcgcggtcaaccctgctggtttagagtaccaaaggttggattgattgctgcaaacgatggcattctacttcgaaaccatattccgagaattcttaagaagcatttcaaggggaagagctactatgtggatcttcttgatttgtttaatgaggtggaattccaaacagcctcgggacaaatgattgatttgatcaccacaattgaaggagagaaagatctttcaaaatactcaattccacttcaccatcgcattgttcagtacaagactgcttactactcattctaccttccggttgcttgtgcattggtgatggctggtgaaaatcttgataaccatgttgatgtgaagaacgttcttattgaaatgggaacctatttccaagtacaggatgactatttggattgttttggccacccagatgtaattggcaagattggtacagatattgaagacttcaagtgctcttggttggttgtgaaagcactcgaaatagctaccgaggaacaaaagaagatgctatttgagcattatggtaagggagatgaagcatctgtcaaaaaagtgaaagagttatacaaggcccttgatcttgagggcgtgtttgcggattacgagaatgctagttaccaaaagcttataaaatcgatcgaagctcatccgaaagaagaagttcaggcagtgctcaaatctttcttggctaagatctacaagaggcagaagtaa

SEQ ID NO: 1104 - protein, 342 aa, Humulus lupulus
MSGLRSKFMEVYSILKSELLNDPAFEFTDDSRQWVERMLDYNVPGGKLNRGLSVIDSYQLLKGGKELTEEEIFLTSALGWCIEWLQAYFLVLDDIMDNSVTRRGQPCWFRVPKVGLIAANDGILLRNHIPRILKKHFKGKSYYVDLLDLFNEVEFQTASGQMIDLITTIEGEKDLSKYSIPLHHRIVQYKTAYYSFYLPVACALVMAGENLDNHVDVKNVLIEMGTYFQVQDDYLDCFGHPDVIGKIGTDIEDFKCSWLVVKALEIATEEQKKMLFEHYGKGDEASVKKVKELYKALDLEGVFADYENASYQKLIKSIEAHPKEEVQAVLKSFLAKIYKRQK

SEQ ID NO: 1105 - DNA, 1047 bp, Eucommia ulmoides
  CDS (1)..(1047)
atggcggaactgaagaaagaatttcttaacgtctactcggtgctgaaaaaggagttgctccatgacccagccttcagcctcactgaagattctcgcaattgggtcgaacggatgttggactacaatgtacccggaggaaaactgaatagaggactttccgtggtggacagctacaagcttctgaaggaactgtcaagttcaaagaaaggagctcaactcactgagagcgaaatatttcattcatctgtgttgggttggtgcattgagtggcttcaagcttgtgcgcttgttctcgacgatattatggacagctcacacacacgccgaggtcaaatgtgttggtacaaactccccaaggttggtatgattgctattaacgatgggcttatacttcgcaatcatgtgccgaggattctcaagaaacattttcgatccaagccttactatctcgaattgttggatttatttcacgaggtggaatgtcagactgttggtggacaaatgattgatttgattactacacttgtaggagagattgatctatctgagtactcattacctacccatcgtcaaattactgtctcaaaaacctcttattactcgttctaccttccggtggcttgtgcacttctaatgaccggcgagaaattggaaagccacagtggcatgaaggacatacttatcgaaatgggaagctattttcaagtccaggatgattacctggattgttttggtgatcctgaggtgattggaaagattggatcagatattgaagattttaagtgcacttggttagtcgtaaaagcattggaactttgtaacgaagaacaaaagaagattttatatgataactatggaaaaaaagacccagaatctgttgctagagtgaaggatctttataaaactctcaagcttcaggacgtgttcgaggagtacgagaaaaagacgcacgagaagctaaacaagtcgattgatgcttatccaagtaaagcagtgcaagcagttctacaatcattcttggctaagattcacaggaggctcaagtag

SEQ ID NO: 1106 - protein, 348 aa, Eucommia ulmoides
MAELKKEFLNVYSVLKKELLHDPAFSLTEDSRNWVERMLDYNVPGGKLNRGLSVVDSYKLLKELSSSKKGAQLTESEIFHSSVLGWCIEWLQACALVLDDIMDSSHTRRGQMCWYKLPKVGMIAINDGLILRNHVPRILKKHFRSKPYYLELLDLFHEVECQTVGGQMIDLITTLVGEIDLSEYSLPTHRQITVSKTSYYSFYLPVACALLMTGEKLESHSGMKDILIEMGSYFQVQDDYLDCFGDPEVIGKIGSDIEDFKCTWLVVKALELCNEEQKKILYDNYGKKDPESVARVKDLYKTLKLQDVFEEYEKKTHEKLNKSIDAYPSKAVQAVLQSFLAKIHRRLK

SEQ ID NO: 1107 - DNA, 1032 bp, Artemisia annua
  CDS (1)..(1032)
atgagtagcatcgatctgaaatccaagtttttaaaagtgtatgatacacttaaatcagagcttattaacgatcccgccttcgaattcgacgatgattcccgtcaatggattgaaaagatgcttgactacaacgtacctggaggaaagctgaaccggggattatctgttgtcgacagttatcagcttcttaaaggaggagaactgtctgatgacgagatttttctttcatctgcccttggttggtgtattgaatggcttcaagcatactttcttgtgcttgatgatatcatggacgagtctcatacacgcagagggcaaccctgttggtttagattactcaaggttggtatgattgctgcgaacgatggaattcttcttcgcaaccatgtcccaagaattcttaagaaacatttccgtggaaagccttactatgtggatcttgtggacctgttcaacgaaggtgtaattcaaacagcctctgggcaaatgattgatttgatccctacccttgttggagagaaagatctctcgaagtattcattgtctattcaccgccgaattgttcaatacaaaacagcttactactcattttaccttccagttgcctgtgcactccttatgtttggagaggatcttgacaagcacgttgaagtgaagaacatgctcgttgaaatgggtacctattttcaagttcaggacgattatctagactgttttggtgctcccgaggtgattggaaagattggaactgatattgaagactttaagtgctcctggttagttgtcaaggcattggaactcgccaatgaggaacaaaagaaagtcctccatgagaactatgggaaaaaggaccccgcgtctgttgctaaagtgaaggaagtataccacactctcaatcttcaggctgtattcgaagattacgaggccacaagttacaagaagcttatcacatcgattgaaaatcgcccaagcaaagcagtccaagcggtgctgaaatctttcttgggtaaaatctacaagaggcaaaagtag

SEQ ID NO: 1108 - protein, 343 aa, Artemisia annua
MSSIDLKSKFLKVYDTLKSELINDPAFEFDDDSRQWIEKMLDYNVPGGKLNRGLSVVDSYQLLKGGELSDDEIFLSSALGWCIEWLQAYFLVLDDIMDESHTRRGQPCWFRLLKVGMIAANDGILLRNHVPRILKKHFRGKPYYVDLVDLFNEGVIQTASGQMIDLIPTLVGEKDLSKYSLSIHRRIVQYKTAYYSFYLPVACALLMFGEDLDKHVEVKNMLVEMGTYFQVQDDYLDCFGAPEVIGKIGTDIEDFKCSWLVVKALELANEEQKKVLHENYGKKDPASVAKVKEVYHTLNLQAVFEDYEATSYKKLITSIENRPSKAVQAVLKSFLGKIYKRQK

SEQ ID NO: 1109 - DNA, 1488 bp, Oryza sativa
  CDS (1)..(1488)
atgaccatgaggaccacgagactgacagctacagtacccatcaacatctggatccatacgaatactaatggcatcgtcgttttggctcgtctcctcccccgcgactataaaaacgggagctttgctgctgcgccggccgccccaccacctccggtccatctcggccgccgccgctgtcgctgtcgcgatcgcgatccccgcctagatagacttccccaagaacccgccgccgccgctgcaggggtggcgtggcatcgcgggagaccagctcgagccttcagcctcttttgcgccgccgccgccgccgccggtcgatccgtgttcttggctcaggcggcgtcaatggcggcggcgaatgggagcgcctgcggcggaggcggcgtggacaaggagaaggaggagttcaagcagatctacggggtgctcaaggaggagctgctcagggaccccgccttcgagttcaccgactcgtcgcggcagtggatcgatcgcgtaatgcttttctccccctctcctttttcatcttgtgttgctgaccgcatgtgtttctcctcccggatcgtttcttccggattttcagtagggtttagatcggggaagtgcaatcgtggtctctctgtggtcgatagctataagctgttgaagggcaccaatgttctaagtcaggaagacatgtttctcgcgagcactcttggttggtgcgttgaatggcttcaagcttactttctcgtgcttgatgatatcatggatgattctcacactcgacgtggtcagccttgttggtttcgggtgcctcaggttggctccattgctatcaatgatggaattatccttcgcaaccatatcacgcgaatgcttcggctccactttagaggaaaactttactatgctgatctccttgatttattcaatgaggtcgagttcaagacagcttcaggtcaattgctagaccttatcactactcacgagggagaaaaagatctaaacaaatataacataggagttcaccgccgcattgttcaatataagacatcctactattcattttatctgccggttgcttgtgcactgttgctatctggagaggacttgaccaaatatggtgctgtagaagacattcttgttaagatgggaatatactttcaagtccaggacgattatctagattgttatggtgaccccaaatttattggcaagatcgggactgacattgaagattacaaatgctcttggctagttgtgcaagcccttgagcgtgctgatgagagtcaaaagagcgttctatttgaaaattatggaaagaaagatccagcctgtgtggcaaaagtgaagagcctctacagagaactaaacctagaggcggtctttctggactatgagaacgagagttacaagaagttgattgcggatatagaagcccagccaagcatagctgttcagaatgttctgaagtccttcttgcacaagatctacaagagacagaagtag

SEQ ID NO: 1110 - protein, 495 aa, Oryza sativa
MTMRTTRLTATVPINIWIHTNTNGIVVLARLLPRDYKNGSFAAAPAAPPPPVHLGRRRCRCRDRDPRLDRLPQEPAAAAAGVAWHRGRPARAFSLFCAAAAAAGRSVFLAQAASMAAANGSACGGGGVDKEKEEFKQIYGVLKEELLRDPAFEFTDSSRQWIDRVMLFSPSPFSSCVADRMCFSSRIVSSGFSVGFRSGKCNRGLSVVDSYKLLKGTNVLSQEDMFLASTLGWCVEWLQAYFLVLDDIMDDSHTRRGQPCWFRVPQVGSIAINDGIILRNHITRMLRLHFRGKLYYADLLDLFNEVEFKTASGQLLDLITTHEGEKDLNKYNIGVHRRIVQYKTSYYSFYLPVACALLLSGEDLTKYGAVEDILVKMGIYFQVQDDYLDCYGDPKFIGKIGTDIEDYKCSWLVVQALERADESQKSVLFENYGKKDPACVAKVKSLYRELNLEAVFLDYENESYKKLIADIEAQPSIAVQNVLKSFLHKIYKRQK

SEQ ID NO: 1111 - DNA, 1032 bp, Artemisia annua
  CDS (1)..(1032)
atgagtagcatcgatctgaaatccaagtttttaaaagtgtatgatacacttaaatcagagcttattaacgatcccgccttcgaattcgacgatgattcccgtcaatggattgaaaagatgcttgactacaacgtacctggaggaaagctgaaccggggattatctgttgtcgacagttatcagcttcttaaaggaggagaactgtctgatgacgagatttttctttcatctgcccttggttggtgtattgaatggcttcaagcatactttcttgtgcttgatgatatcatggacgagtctcatacacgcagagggcaaccctgttggtttagattactcaaggttggtatgattgctgcgaacgatggaattcttcttcgcaaccatgtcccaagaattcttaagaaacatttccgtggaaagccttactatgtggatcttgtggacctgttcaacgaggttgaattccaaacagcctctggtcagatgattgatttgatcactacacttgttggagagaaagatctctcgaagtattcattgtctattcaccgccgaattgttcaatacaaaacagcttactactcattttaccttccagttgcctgtgcactccttatgtttggagaggatcttgacaagcacgttgaagtgaagaacatgctcgttgaaatgggtacctattttcaagttcaggacgattatctagactgttttggtgctcccgaggtgattggaaagattggaactgatattgaagactttaagtgctcctggttagttgtcaaggcattggaactcgccaatgaggaacaaaagaaagtcctacatgagaactatgggaaaaaggaccccgcgtctgttgctaaagtgaaggaagtataccacactctcaatcttcaggctgtattcgaagattacgaggccacaagttacaagaagcttatcacatcgattgaaaatcgcccaagcaaagcagtccaagcggtgctgaaatctttcttgggtaaaatctacaagaggcaaaagtag

SEQ ID NO: 1112 - protein, 343 aa, Artemisia annua
MSSIDLKSKFLKVYDTLKSELINDPAFEFDDDSRQWIEKMLDYNVPGGKLNRGLSVVDSYQLLKGGELSDDEIFLSSALGWCIEWLQAYFLVLDDIMDESHTRRGQPCWFRLLKVGMIAANDGILLRNHVPRILKKHFRGKPYYVDLVDLFNEVEFQTASGQMIDLITTLVGEKDLSKYSLSIHRRIVQYKTAYYSFYLPVACALLMFGEDLDKHVEVKNMLVEMGTYFQVQDDYLDCFGAPEVIGKIGTDIEDFKCSWLVVKALELANEEQKKVLHENYGKKDPASVAKVKEVYHTLNLQAVFEDYEATSYKKLITSIENRPSKAVQAVLKSFLGKIYKRQK

SEQ ID NO: 1113 - DNA, 1155 bp, Arabidopsis thaliana
  CDS (1)..(1155)
atgagtgtgagttgttgttgtaggaatctgggcaagacaataaaaaaggcaataccttcacatcatttgcatctgagaagtcttggtgggagtctctatcgtcgtcgtatccaaagctcttcaatggagaccgatctcaagtcaacctttctcaacgtttattctgttctcaagtctgaccttcttcatgacccttccttcgaattcaccaatgaatctcgtctctgggttgatcggatgctggactacaatgtacgtggagggaaactcaatcggggtctctctgttgttgacagtttcaaacttttgaagcaaggcaatgatttgactgagcaagaggttttcctctcttgtgctctcggttggtgcattgaatggctccaagcttatttccttgtgcttgatgatattatggataactctgtcactcgccgtggtcaaccttgctggttcagagttcctcaggttggtatggttgccatcaatgatgggattctacttcgcaatcacatccacaggattctcaaaaagcatttccgtgataagccttactatgttgaccttgttgatttgtttaatgaggttgagttgcaaacagcttgtggccagatgatagatttgatcaccacctttgaaggagaaaaggatttggccaagtactcattgtcaatccaccgtcgtattgtccagtacaaaacggcttattactcattttatctccctgttgcttgtgcgttgcttatggccggcgaaaatttggaaaaccatattgatgtgaagaatgttcttgttgacatgggaatctacttccaagtgcaggatgattatctggattgttttgctgatcccgagacgcttggcaagataggaacagatatagaagatttcaaatgctcgtggttggtggttaaggcattagagcgctgcagcgaagaacaaactaagatattatatgagaactatggtaaacccgacccatcgaacgttgctaaagtgaaggatctctacaaagagctggatcttgagggagttttcatggagtatgagagcaaaagctacgagaagctgactggagcgattgagggacaccaaagtaaagcaatccaagcagtgctaaaatccttcttggctaagatctacaagaggcagaagtag

SEQ ID NO: 1114 - protein, 384 aa, Arabidopsis thaliana
MSVSCCCRNLGKTIKKAIPSHHLHLRSLGGSLYRRRIQSSSMETDLKSTFLNVYSVLKSDLLHDPSFEFTNESRLWVDRMLDYNVRGGKLNRGLSVVDSFKLLKQGNDLTEQEVFLSCALGWCIEWLQAYFLVLDDIMDNSVTRRGQPCWFRVPQVGMVAINDGILLRNHIHRILKKHFRDKPYYVDLVDLFNEVELQTACGQMIDLITTFEGEKDLAKYSLSIHRRIVQYKTAYYSFYLPVACALLMAGENLENHIDVKNVLVDMGIYFQVQDDYLDCFADPETLGKIGTDIEDFKCSWLVVKALERCSEEQTKILYENYGKPDPSNVAKVKDLYKELDLEGVFMEYESKSYEKLTGAIEGHQSKAIQAVLKSFLAKIYKRQK

SEQ ID NO: 1115 - DNA, 1029 bp, Lupinus albus
  CDS (1)..(1029)
atggcagatctaaggtcaactttcttgaatgtgtattcggttctgaaatcagagctccttcatgacccagcttttgaattctctcctgattctcgtcaatggctcgaccggatgctggactacaatgtgcctggaggaaagctaaaccgtggactgtcagttattgacagctacagattgttgaaagatggacatgaattaaacgatgatgaaatttttcttgctagtgctcttggttggtgtattgaatggcttcaggcatatttccttgttcttgatgacattatggataactcccacacacggcgtggtcagccatgttggttcagagtacccaaggttggaatgattgcagcaaatgatggggtgctgctacggaaccatattcctcgtatccttaagaaacacttcaggggaaaaccttattatgctgatcttcttgatctgtttaatgaggttgagtttcaaactgcttcagggcagatgatagatctgatcactacactggaaggagaaaaagacctgtctaaatacacattatcactacaccgccgtattgttcagtacaagactgcctattattcgttttacctcccagtcgcatgtgcattactcatggtgggtgagaatcttgataaccatattgacgtgaaaaacattcttgttgatatgggaacgtactttcaagtacaggatgattatttggattgctttggtgctcctgaaacaattggaaagataggtacagatattgaagattttaagtgctcttggttggtcgtgaaagcattggaacttagcaatgatgaacagaagaaagttttatatgataactatgggaaaccagatccagcaaatgttgctaaagtgaaggcgctgtatgacgagcttaatcttcagggtgtatttacggagtatgagagcaagagttatgagaagcttgtaacctccattgaagctcatcctagcaaagcagttcaagctctattgaagtcctttttgggtaaaatttacaagaggcagaaatag

SEQ ID NO: 1116 - protein, 342 aa, Lupinus albus
MADLRSTFLNVYSVLKSELLHDPAFEFSPDSRQWLDRMLDYNVPGGKLNRGLSVIDSYRLLKDGHELNDDEIFLASALGWCIEWLQAYFLVLDDIMDNSHTRRGQPCWFRVPKVGMIAANDGVLLRNHIPRILKKHFRGKPYYADLLDLFNEVEFQTASGQMIDLITTLEGEKDLSKYTLSLHRRIVQYKTAYYSFYLPVACALLMVGENLDNHIDVKNILVDMGTYFQVQDDYLDCFGAPETIGKIGTDIEDFKCSWLVVKALELSNDEQKKVLYDNYGKPDPANVAKVKALYDELNLQGVFTEYESKSYEKLVTSIEAHPSKAVQALLKSFLGKIYKRQK

SEQ ID NO: 1117 - DNA, 1029 bp, Parthenium argentatum
  CDS (1)..(1029)
atgagcagcgatctaaaatccagattccttcaagtgtacgacactctcaaatcagagctaatcaacgatcctgccttcgagttcgacgacgactcccgtcaatgggtggagaagatgcttgactacaacgtacctggaggaaagctgaatcggggcctctctgttattgacagttaccaattgcttaaaggtggagaattgacagacaatgagattttccttgcagcagcccttggttggtgcattgaatggcttcaagcatactttcttgtgcttgatgatatcatggatgagtcccatacacgcagaggtcaaccctgttggttcagattacccaaggttggtatgattgctgcaaatgatggaataattcttcgtaacaatgtcccaagaattctcaagaaacatttccgaggaaagccttattatgtggatctattggacctgttcaatgaggtagaattccaaacagcctcgggacaaatgatagatttgattactacacttgttggagagaaagatctctcaaagtattcgttgtctattcaccgacggattgttcagtacaaaactgcttactactcattttatcttccagttgcctgtgcactccttatgtttggtgaggatttggagaaacacgaggaagtgaagaacgtacttgttgaaatgggtacctattttcaagtgcaggacgattatctagactgttttggtgctcctgaggttattggaaagattggaacagacattgaagactttaagtgttcctggttagttgtgaaagcgttggaactttccaacgaggaacaaaagaaaatcctacatgagaactatgggaaaaaagatccctcttcagttgcaaaagtgaaggaactataccacactctaaatcttcagggtgtattcgaagattatgagaacaccagctacaagaagctgatcacatcgatcgaaggtcatccaagcaaagcagtacaagcggtgttgaaatctttcttaggaaagatatacaagaggcaaaagtag

SEQ ID NO: 1118 - protein, 342 aa, Parthenium argentatum
MSSDLKSRFLQVYDTLKSELINDPAFEFDDDSRQWVEKMLDYNVPGGKLNRGLSVIDSYQLLKGGELTDNEIFLAAALGWCIEWLQAYFLVLDDIMDESHTRRGQPCWFRLPKVGMIAANDGIILRNNVPRILKKHFRGKPYYVDLLDLFNEVEFQTASGQMIDLITTLVGEKDLSKYSLSIHRRIVQYKTAYYSFYLPVACALLMFGEDLEKHEEVKNVLVEMGTYFQVQDDYLDCFGAPEVIGKIGTDIEDFKCSWLVVKALELSNEEQKKILHENYGKKDPSSVAKVKELYHTLNLQGVFEDYENTSYKKLITSIEGHPSKAVQAVLKSFLGKIYKRQK

SEQ ID NO: 1119 - DNA, 1029 bp, Arabidopsis thaliana
  CDS (1)..(1029)
atggcggatctgaaatcaaccttcctcgacgtttactctgttctcaagtctgatctgcttcaagatccttcctttgaattcacccacgaatctcgtcaatggcttgaacggatgcttgactacaatgtacgcggagggaagctaaatcgtggtctctctgtggttgatagctacaagctgttgaagcaaggtcaagacttgacggagaaagagactttcctctcatgtgctcttggttggtgcattgaatggcttcaagcttatttccttgtgcttgatgacatcatggacaactctgtcacacgccgtggccagccttgttggtttagaaagccaaaggttggtatgattgccattaacgatgggattctacttcgcaatcatatccacaggattctcaaaaagcacttcagggaaatgccttactatgttgacctcgttgatttgtttaacgaggtagagtttcaaacagcttgcggccagatgattgatttgatcaccacctttgatggagaaaaagatttgtctaagtactccttgcaaatccatcggcgtattgttgagtacaaaacagcttattactcattttatcttcctgttgcttgcgcattgctcatggcgggagaaaatttggaaaaccatactgatgtgaagactgttcttgttgacatgggaatttactttcaagtacaggatgattatctggactgttttgctgatcctgagacacttggcaagatagggacagacatagaagatttcaaatgctcctggttggtagttaaggcattggaacgctgcagtgaagaacaaactaagatactatacgagaactatggtaaagccgaaccatcaaacgttgctaaggtgaaagctctctacaaagagcttgatctcgagggagcgttcatggaatatgagaaggaaagctatgagaagctgacaaagttgatcgaagctcaccagagtaaagcaattcaagcagtgctaaaatctttcttggctaagatctacaagaggcagaagtag

SEQ ID NO: 1120 - protein, 342 aa, Arabidopsis thaliana
MADLKSTFLDVYSVLKSDLLQDPSFEFTHESRQWLERMLDYNVRGGKLNRGLSVVDSYKLLKQGQDLTEKETFLSCALGWCIEWLQAYFLVLDDIMDNSVTRRGQPCWFRKPKVGMIAINDGILLRNHIHRILKKHFREMPYYVDLVDLFNEVEFQTACGQMIDLITTFDGEKDLSKYSLQIHRRIVEYKTAYYSFYLPVACALLMAGENLENHTDVKTVLVDMGIYFQVQDDYLDCFADPETLGKIGTDIEDFKCSWLVVKALERCSEEQTKILYENYGKAEPSNVAKVKALYKELDLEGAFMEYEKESYEKLTKLIEAHQSKAIQAVLKSFLAKIYKRQK

SEQ ID NO: 1121 - DNA, 1029 bp, Lupinus albus
  CDS (1)..(1029)
atggcagatcccaaatctagtttcttgaatgtctattccattctcaaatctgagctccttcaagaccctgctttcgaattctccactgattctcgtcaatgggtcgaaaggatgctggactacaatgtgcctggaggaaagctgaaccgtggactgtcggttattgacagctacaaattgttaaaagatggacaggaattaaatgatgaagaaattttccttgctagtgctcttggttggtgcattgaatggcttcaggcatatttccttgttcttgatgacatcatggataactctcacacacggcgtggtcacccgtgctggtttagagtacccaaggttggaatgattgcaccaaacgatggggtggttctacgaaaccatattcctcgtatccttaagaaacacttcaggggaaagccatactatgttgatctgcttgatctgtttaatgaggtcgagtttcagactgcttcaggacagatgatagatctgatcactacactggaaggagaaaaagatctgtctaaatacacattatcactgcaccgtcgtattgttcagtacaagactgcctattattcattttacctcccagttgcatgtgcattgctcatggtgggtgagaatcttgataaccatactgatgtgaaaaacattcttgttgagatgggaacatactttcaagtgcaggatgattatttggattgctttggtgctcctgaaacaattggaaagataggtacagatattgaagattttaagtgctcttggttggttgtgaaagcattggaacttagcaatgaagaacaaaagaaagttttatatgagaattatgggaagccagatcctgcaaatgttgctaaagtgaagaccctatataatgagctaaatcttgagggtgcgtatgcggattacgagagcaagagctatgagaaacttgtaacctgcattgaaggtcatcctagcaaagcagttcaaggtgtattgaagtcgttttgggctaaaatttacaagaggcagaagtag

SEQ ID NO: 1122 - protein, 342 aa, Lupinus albus
MADPKSSFLNVYSILKSELLQDPAFEFSTDSRQWVERMLDYNVPGGKLNRGLSVIDSYKLLKDGQELNDEEIFLASALGWCIEWLQAYFLVLDDIMDNSHTRRGHPCWFRVPKVGMIAPNDGVVLRNHIPRILKKHFRGKPYYVDLLDLFNEVEFQTASGQMIDLITTLEGEKDLSKYTLSLHRRIVQYKTAYYSFYLPVACALLMVGENLDNHTDVKNILVEMGTYFQVQDDYLDCFGAPETIGKIGTDIEDFKCSWLVVKALELSNEEQKKVLYENYGKPDPANVAKVKTLYNELNLEGAYADYESKSYEKLVTCIEGHPSKAVQGVLKSFWAKIYKRQK

SEQ ID NO: 1123 - DNA, 1029 bp, Parthenium argentatum
  CDS (1)..(1029)
atgagtactgatattaggtctaaattcctacaggtttacgatactcttaaatcagagcttattaacgatccagcttttgagttcgacgatgattctcgtcaatggatcgagaagatgcttgactacaacgtacctggaggaaagttgaaccggggcctctctgttattgacagctaccaattacttaaaggaggaaaactgactgatgatgagatttttcatgcatctgcccttggctggtgtgttgaatggcttcaagcatacttccttgtgcttgatgatatcatggatgagtctcatacacgcagaggtcaaccctgttggttcagattacccaaggttggtatgattgctgcaaatgatggaataattcttcgcaaccatgtcccaagaattctcaaaaagcattttcgaggaaagccatattatgtggatctagttgacctattcaacgaggtagaattccaaacagcttctggacagatgattgatttgatcactacacttgttggagaaaaagatctatcaaagtattcattgtctattcatcgaaggattgttcagtacaaaaccgcttattactcattttaccttccggttgcttgtgcgctccttatgtttggtgaggatttggagaagcatgttgaagtgaagaatgtacttgttgaaatgggtacctattttcaagtgcaggacgattatctagactgttttggtgctcccgaggtaattggaaagattggaacagacattgaagactttaagtgctcgtggctagttgtgaaagctttggaacttgccaatgaggaacaaaagaaagtcctacatgaaaactatggaaagaaagacccctctccggttgcaaaagtgaaggagctatacaacactctaaatcttcagggagtatttgaagattacgagaacacgagttacaagaagctaatcacatccattgaaggtcacccaagcaaagccgtacaagcggtgttgaaatcgttcttggggaaaatatacaggaggcaaaagtag

SEQ ID NO: 1124 - protein, 342 aa, Parthenium argentatum
MSTDIRSKFLQVYDTLKSELINDPAFEFDDDSRQWIEKMLDYNVPGGKLNRGLSVIDSYQLLKGGKLTDDEIFHASALGWCVEWLQAYFLVLDDIMDESHTRRGQPCWFRLPKVGMIAANDGIILRNHVPRILKKHFRGKPYYVDLVDLFNEVEFQTASGQMIDLITTLVGEKDLSKYSLSIHRRIVQYKTAYYSFYLPVACALLMFGEDLEKHVEVKNVLVEMGTYFQVQDDYLDCFGAPEVIGKIGTDIEDFKCSWLVVKALELANEEQKKVLHENYGKKDPSPVAKVKELYNTLNLQGVFEDYENTSYKKLITSIEGHPSKAVQAVLKSFLGKIYRRQK

SEQ ID NO: 1125 - DNA, 1032 bp, Artemisia annua
  CDS (1)..(1032)
atgagtagtaccgatctgaaatcaaagtttttgaaagtgtatgatacacttaaatcagagcttattaacgatcccgccttcgaatttgacgatgattcccgtcaatggattgaaaagatgcttgactacaatgtacctggaggaaagctgaaccggggattatctgttgtcgacagttatcagctgcttaaaggaggagaattgtctgatgacgagatttttctttcatctgcccttggttggtgtattgaatggcttcaagcatactttcttgtgcttgatgatatcatggacgagtctcatacacgcagagggcaaccctgttggtttagattacccaaggttggtatgattgctgcgaacgatggaattcttcttcgtaaccatgtcccgagaattcttaagaaacatttccgaggaaagccttactatgtggatcttgtggacctgttcaacgaggttgaattccaaacagcctctggtcagatgattgatttgatcactacacttgttggagagaaagatctctctaagtattcattgtctattcaccgccgaattgttcaatacaaaacagcttactactcattttaccttccagttgcctgtgcactccttatgtttggagaggatcttgacaagcacgttgaagtgaagaacgtgctcgttgaaatgggtacctattttcaagttcaggacgattatctagactgttttggtgctcccgaggtgattggaaagattggaaccgatattgaagactttaagtgctcctggttagttgtcaaagcattggaacttcccaatgaggaacaaaagaaaaccctgcatgagaactatgggaaaaaagaccccgcgtctgttgctaaagtgaaggaagtataccacactctcaatcttcaggctgtattcgaagattacgaggcaacaagttacaagaagctgatcacctcgattgaaaatcacccaagcaaagcagtccaagcggtgttgaaatccttcttgggtaaaatttacaagaggcaaaagtag

SEQ ID NO: 1126 - protein, 343 aa, Artemisia annua
MSSTDLKSKFLKVYDTLKSELINDPAFEFDDDSRQWIEKMLDYNVPGGKLNRGLSVVDSYQLLKGGELSDDEIFLSSALGWCIEWLQAYFLVLDDIMDESHTRRGQPCWFRLPKVGMIAANDGILLRNHVPRILKKHFRGKPYYVDLVDLFNEVEFQTASGQMIDLITTLVGEKDLSKYSLSIHRRIVQYKTAYYSFYLPVACALLMFGEDLDKHVEVKNVLVEMGTYFQVQDDYLDCFGAPEVIGKIGTDIEDFKCSWLVVKALELPNEEQKKTLHENYGKKDPASVAKVKEVYHTLNLQAVFEDYEATSYKKLITSIENHPSKAVQAVLKSFLGKIYKRQK

SEQ ID NO: 1127 - DNA, 1044 bp, Gibberella fujikuroi
  CDS (1)..(1044)
atggctcaacaaaccacccttcaggagttcaactccgtctaccccaagcttgaggaggctcttctcgaccatgcccgctcctacaagctccctcaagagcagctcgactggtacaaaagatctctcgaagtcaaccctctcggtggaaaatgcaaccgcggcatgtccgtccccgactcggtctccctcctcctcgagaagcctcttaccgaagagcagtatttccaagctgctacgcttggctggatgacggagcttctccaggccttctttctcgtttccgacgacatcatggattcgagcattacccgccgtggccagccctgttggtaccgccaagagggtgttggcatgatagctatcaacgacgctttcatgcttgaatcggccatttacactcttctcaagaagtacttccgctctcacccggcctacttcgatcttatcgagtcttttcacgagaccacctttcagacagagctcggccagctgtgcgacctactcaccgctcctgaagacaatgtcaacctcgacaacttctctcttgagaagtatagtttcattgtcatttataagaccgcctattactcattctacctccccgtcgccctcgcccttcaccagctcaaccttgccactcccagcaacctcaagcaagctgaggatatcctcattcctctcggggagtactttcaaatccaagatgactaccttgacaacttcggcaagcctgagcatataggcaagatcggcaccgacatcaaggataacaagtgctcttggctcgtcaaccaggccctggccgtagcaacccctgagcagcgaaagattcttgaggaaaactatggccgcaaggacgatgagaaggagaaggtcgtcaagaagctttacgatgacctcaatcttgagcagcgttatctggactatgaagagaaagttgtcggccaaatccgtgagcgcattgctaacatcgatgagaacgatggtctcaagaaaactgttttcgaggccttccttgccaagatctacaagcgcagcaagtaa

SEQ ID NO: 1128 - protein, 347 aa, Gibberella fujikuroi
MAQQTTLQEFNSVYPKLEEALLDHARSYKLPQEQLDWYKRSLEVNPLGGKCNRGMSVPDSVSLLLEKPLTEEQYFQAATLGWMTELLQAFFLVSDDIMDSSITRRGQPCWYRQEGVGMIAINDAFMLESAIYTLLKKYFRSHPAYFDLIESFHETTFQTELGQLCDLLTAPEDNVNLDNFSLEKYSFIVIYKTAYYSFYLPVALALHQLNLATPSNLKQAEDILIPLGEYFQIQDDYLDNFGKPEHIGKIGTDIKDNKCSWLVNQALAVATPEQRKILEENYGRKDDEKEKVVKKLYDDLNLEQRYLDYEEKVVGQIRERIANIDENDGLKKTVFEAFLAKIYKRSK

SEQ ID NO: 1129 - DNA, 1026 bp, Helianthus annuus
  CDS (1)..(1026)
atggcctctgatctcaagtctaaattcctccacgtttatcaaactctcaaatccgaattactcaacgatccagccttcgaattccaccacgattctcgtcaatggatcgataagatgcttgactacaacgtacccggaggaaagctgaatcggggcctctctgttgttgacagctaccagttacttaaaggagcagaactgactgatgatgagatttttcttgcatctgcccttggttggtgcattgaatggcttcaagcatactttcttgtgcttgatgacatcatggacgggtctcatacacgcagaggtcaaccctgttggttcagattacccaaggttggtatgattgctgcaaacgatggattgattcttcgcaaccatgtcccaagaattctcaaaaagcattttcgaggaaagccgtattatgtggatctagttgacctattcaacgaggtagaattccaaacagcctctggacagatgattgatttgatcactacacttgttggagaaaaagatctctcaaagtattcattgtctattcatcgccggattgttcagtacaaaaccgcttattactcattttaccttcctgttgcttgtgcgctccttatgttcggtgaggatttggacaatcatgttgaagtgaagaatgtacttgtagaaatgggtacctattttcaagtgcaggacgattatctagactgttttggtgctcccgaggtaattggaaagattggaacagacattgaagactttagttcatggctagttgtaaaagctttggaacttgccaatgaggaacaaaagaaagtcctacatgaaaattatggaaaaaaagacccctcttcggttgcaaaagtgaaggaactatacaacactctaaatcttcagggcgtatttgaagattatgagagcacaagttacaagaagctaatcacgtccattgaaggtcacccaagcaaagccgtacaagcagtgttgaaatcgttcttgggaaagatatacaagaggcaaaagtag

SEQ ID NO: 1130 - protein, 341 aa, Helianthus annuus
MASDLKSKFLHVYQTLKSELLNDPAFEFHHDSRQWIDKMLDYNVPGGKLNRGLSVVDSYQLLKGAELTDDEIFLASALGWCIEWLQAYFLVLDDIMDGSHTRRGQPCWFRLPKVGMIAANDGLILRNHVPRILKKHFRGKPYYVDLVDLFNEVEFQTASGQMIDLITTLVGEKDLSKYSLSIHRRIVQYKTAYYSFYLPVACALLMFGEDLDNHVEVKNVLVEMGTYFQVQDDYLDCFGAPEVIGKIGTDIEDFSSWLVVKALELANEEQKKVLHENYGKKDPSSVAKVKELYNTLNLQGVFEDYESTSYKKLITSIEGHPSKAVQAVLKSFLGKIYKRQK

SEQ ID NO: 1131 - DNA, 1050 bp, Kluyveromyces lactis
  CDS (1)..(1050)
atgagtgataacagagcccagtttttggaagtgttcccatcattagtacaagagcttagagacatcttggccgggtacggtatgcccgaagaagccatcgaatggtacgaaaaatcattgaactacaacaccccaggtggtaagttgaaccgtggtctttctgtcgttgacacatacgcgcttttgaaaggttacaagtcagtgagcgaactatctgcagaagagtacaagaaggttgccatccttggttggtgtattgaactgttgcaagcgtacttcttggttgctgatgacatgatggaccaatcgatcacaagaagaggacaaccatgttggtacaaagtggaaaacgtcggcgacattgcgatcaacgatgcattcatgttggaaggtgccatctactgtctgttgaagaaacacttcagaacagagccatactacgtcgatctattggaattgttccatgacgttacttttcaaaccgaattgggtcagttgttggatttgatcactgcaccagaggacaaagtcgacttatccaagttctctttggaaaagcattccttcatcgttatcttcaagactgcatactactctttctacttagcagtggcactggccatgtttgctgccggtattaccgactcaaaggacttgaaacaggccagcgacgtattgatcccattgggagaatatttccaaatccaagacgatttcttggattgtttcggtaaaccagaagatatcggtaagattggtaccgatatccaagacaacaaatgttcttgggtcatcaacgttgcattgaagaatgctacaaaagaacaaagagatatcttggacgaaaactacggtagaaaggattctgaaaaggaacaaaaatgtagagctgtattcaacgaattgaacatccaagacatctaccacaagtacgaagaagaaaccgcttccaacttaagagagaaaatcgctaacatcgacgaatcccgtgggttcaaggccgaagttctaaccttgttcttgaacaaaatataccacagaaagaagtag

SEQ ID NO: 1132 - protein, 349 aa, Kluyveromyces lactis
MSDNRAQFLEVFPSLVQELRDILAGYGMPEEAIEWYEKSLNYNTPGGKLNRGLSVVDTYALLKGYKSVSELSAEEYKKVAILGWCIELLQAYFLVADDMMDQSITRRGQPCWYKVENVGDIAINDAFMLEGAIYCLLKKHFRTEPYYVDLLELFHDVTFQTELGQLLDLITAPEDKVDLSKFSLEKHSFIVIFKTAYYSFYLAVALAMFAAGITDSKDLKQASDVLIPLGEYFQIQDDFLDCFGKPEDIGKIGTDIQDNKCSWVINVALKNATKEQRDILDENYGRKDSEKEQKCRAVFNELNIQDIYHKYEEETASNLREKIANIDESRGFKAEVLTLFLNKIYHRKK

SEQ ID NO: 1133 - DNA, 1053 bp, Zea mays
  CDS (1)..(1053)
atggcggcaggcgggaatggcgccggcggggacaccagggcggccttcgcgcggatctacaagacgctcaaggaggagctgctcaccgacccggccttcgagttcaccgaggagtcacgccagtggatcgaccgcatggttgactacaatgtactcggaggcaagtgtaaccgtgggctctctgtggtcgacagctacaagctgctcaagggcgctgatgctctgggcgaggaggaaacgttccttgcttgcaccctcggctggtgcattgaatggcttcaggctttctttcttgtgcttgatgatatcatggatgactctcacactcgtcgcggccagccttgctggttcagggtgcctcaggttggcttaattgctgcgaatgacgggatcatccttcgcaaccatatctcacggatccttcggcgccactttaagggcaaaccttactatgctgatctccttgatttgttcaatgaggttgagttcaagacagcttcaggtcagctgctggaccttatcactacccatgagggagaaaaagatctaacaaagtataacataacagttcacggtcgaattgttcaatacaagacagcctattattcattttatctgccggttgcatgtgccctgctgctctctggcgagaatttggacaattatggtgatgtagagaacatccttgttgaaatgggaacatactttcaagtccaggatgactatctggattgttacggtgatcctgaatttatcggcaagattggaacggacattgaagattacaagtgctcatggctagttgtgcaagcccttgagcgtgctgatgagagccaaaagcgcattctatttgaaaattatggcaagaaagatccagcctgtgtggcaaaagtgaagaacctctacaaagaacttgacctagaggcggtatttcaggagtacgagaatgagagctacaagaagctgattgcagacattgaagcccagccaagcattgcggttcagaaagtgctgaaatccttcttgcacaagatctacaagaggcagaagtag

SEQ ID NO: 1134 - protein, 350 aa, Zea mays
MAAGGNGAGGDTRAAFARIYKTLKEELLTDPAFEFTEESRQWIDRMVDYNVLGGKCNRGLSVVDSYKLLKGADALGEEETFLACTLGWCIEWLQAFFLVLDDIMDDSHTRRGQPCWFRVPQVGLIAANDGIILRNHISRILRRHFKGKPYYADLLDLFNEVEFKTASGQLLDLITTHEGEKDLTKYNITVHGRIVQYKTAYYSFYLPVACALLLSGENLDNYGDVENILVEMGTYFQVQDDYLDCYGDPEFIGKIGTDIEDYKCSWLVVQALERADESQKRILFENYGKKDPACVAKVKNLYKELDLEAVFQEYENESYKKLIADIEAQPSIAVQKVLKSFLHKIYKRQK

SEQ ID NO: 1135 - DNA, 1044 bp, Neurospora crassa
  CDS (1)..(1044)
atggccaagacaacgacccttaaggaattcgagagcgtcttccccaagctggaggaggcgctcctcgagtatgccaaggcatacaagctgcccgagcagatgctcagctggtacaagcagtccctcgaggtcaacaccctcggcggcaagtgcaaccgcggcatgtccgtccccgactcggcctccatcctgctcggccgccccctgaccgaggaggaatacttccaggccgcgacgctcggctggatgactgagctcctccaggccttcttcctggtctccgacgacatcatggactcgtccatcacgcgccgcggcaagccgtgctggtaccgccaggagggcgtgggcatggttgccatcaacgacgccttcatgctcgagtcggccatctacacgctgctcaagaagtacttccgctcgcacccgcgttacgtcgacttcctcgagctcttccacgaggtgaccttccagacggagatgggccagctgtgcgacctgctcacggcgcccgaggacaaggtcgacctggacaacttctcgatggacaagtacaccttcatcgtcatctacaagacggcctactactcgttctacctgcccgtcgcgcttgccatgtacatgctcgacatcgccactccggagaacctcaagcaggccgaggacatcctgatcccgctgggcgagtacttccaggtgcaggacgactacctggacaactttggcctgccagagcacattggcaagatcggcaccgacatccaggataacaagtgctcgtggctggtcaacaaggcgctcagcattgtcacacccgagcaacgcaaaacgctcgaggagaactacggccgcaaggacaaggccaaggaagctgtcatcaagcagctgtacgacgatctcaagctcgaggaccactacaagcagtacgaggaagagcgcgtcggcgagatccgcaagatgattgatgccattgacgagagcaagggtctcaagaagcaggtctttgaggccttccttggtaagatctacaagcgcagcaagtaa

SEQ ID NO: 1136 - protein, 347 aa, Neurospora crassa
MAKTTTLKEFESVFPKLEEALLEYAKAYKLPEQMLSWYKQSLEVNTLGGKCNRGMSVPDSASILLGRPLTEEEYFQAATLGWMTELLQAFFLVSDDIMDSSITRRGKPCWYRQEGVGMVAINDAFMLESAIYTLLKKYFRSHPRYVDFLELFHEVTFQTEMGQLCDLLTAPEDKVDLDNFSMDKYTFIVIYKTAYYSFYLPVALAMYMLDIATPENLKQAEDILIPLGEYFQVQDDYLDNFGLPEHIGKIGTDIQDNKCSWLVNKALSIVTPEQRKTLEENYGRKDKAKEAVIKQLYDDLKLEDHYKQYEEERVGEIRKMIDAIDESKGLKKQVFEAFLGKIYKRSK

SEQ ID NO: 1137 - DNA, 1044 bp, Schizosaccharomyces pombe
  CDS (1)..(1044)
atgtctgcagttgataaaagagcaaaattcgaatctgctttgccagtttttgttgatgaaatcgtcaattatctcaaaactatcaatattcctgacgatgtcacagaatggtacaagaatagtcttttccataacacattaggtggaaagtataatcgtggattatctgttattgacagttatgaaattcttcttggacatcctttggacgaagcagcgtacatgaaagcagctgttttgggatggatggtcgagttgcttcaatcttttttccttattgctgatgacattatggatgcttccaagactagaaggggtcaaccatgttggtatttaatgcctggcgttggtaatattgctattaatgacgcgtttatggtagaatctgctatttactttcttttgaaaaagcattttcgtcaagagtcatgctacgttgatctaattgaacttttccacgacgtaacttttcaaacggaattagggcagcaactcgatttacttactgctcccgaagactccgtcgatctttcgaagttttctcttcaaaagcattctttcattgtaatttacaagactgcattttattccttttatttgcctgtcgcattggcaatgcatctcgctggtgtagctactcctgagaacttgaaatgcgcccaagacatccttattatccttggtaaatacttccaagttcaagatgattatttagattgctatggtgatcctacggtaactggtaaaattgggactgatattttagacaacaaatgttcttggattatcaatcttgctctcgcaaagtgtactcctgaacaacgtgttattttggacgacaattatggacgtaaagatagcgaaagcgaaaagagagttaaagctgtttttgaggaactcaatatccgtggtgaattcgagaactatgaggaatcagaagtttctgaaatcaaaaagctaattgatggagttgatgaatcaaccggtttgaaaaaatccatatttaccactttcttaggaaagatttacaaaagaaataagtaa

SEQ ID NO: 1138 - protein, 347 aa, Schizosaccharomyces pombe
MSAVDKRAKFESALPVFVDEIVNYLKTINIPDDVTEWYKNSLFHNTLGGKYNRGLSVIDSYEILLGHPLDEAAYMKAAVLGWMVELLQSFFLIADDIMDASKTRRGQPCWYLMPGVGNIAINDAFMVESAIYFLLKKHFRQESCYVDLIELFHDVTFQTELGQQLDLLTAPEDSVDLSKFSLQKHSFIVIYKTAFYSFYLPVALAMHLAGVATPENLKCAQDILIILGKYFQVQDDYLDCYGDPTVTGKIGTDILDNKCSWIINLALAKCTPEQRVILDDNYGRKDSESEKRVKAVFEELNIRGEFENYEESEVSEIKKLIDGVDESTGLKKSIFTTFLGKIYKRNK

SEQ ID NO: 1139 - DNA, 1412 bp, Triticum aestivum
  CDS (200)..(1252)
gcgatccccagtctcccctccgcccatcacccgtcgccgtcgcagccccgcccctaaaatagctccgcgccccgcgcccctcgcagccgccacccgccatccgcccccctcctctctcccagcgcggccgtactgaggtcactctcggccgatttactcctcggcttccctcccctgccatcccctgtttgaggaggcaatggcggcggcggcaaacggcgggggcggggagaccaaggcggcgttcgcgcggatctacgacgcgctcaaggcggagctgctccgggaccccgccttcgagtacacggagtcgtcgcaccagtggatcgaccgcatgctggactacaatgtactgggaggaaagtgcaaccgtgggctctctgtggtcgatagctataagctgttgaaaggcgtcgatgttcttaccgaggaggagatgtttcttgcctccactctcggttggtgcattgaatggcttcaagccttctttcttgtgctcgatgatatcatggacgactcccacactcgacgtgggcagccttgttggtttagggtgcctcaggttggcttcattgctgtaaatgatgggattctccttcgcaaccatatttcgagaatgcttcggctccactttaagaagaagccttactatgccgatctccttgatttattcaacgaggttgagttcaagacagcttctggtcaaatgctggaccttattacaacccatgagggagaaaaagatctaacgaaatataacattggggtccaccgccgaattgttcaattcaagacagcctactattcattttatctgccggttgcatgtgcgctactactctctggtgagagtttggagaactacggtgctgtagagaacatacttgttgagatgggaacttacttccaagttcaggatgattatctggactgttatggtgatcctgaattcattggcaagataggcaccgacattgaagattacaagtgctcctggctagttgtccaagctcttgagcatgctgatgagagccaaaagagcattctatttgaaaactatggaaagaaagatccagcatgtgtggcaaaagtgaaggatctctacaaagaacttaaccttgaggcagtattccatgagtacgagagcgagagctacaagaagctgattgctgatatcgaagcccagccgagcgttcctgttcagaaggttctgaagtccttcttgcacaagatctacatgaggcagaagtagggggtgtctcttgggcaggaaatctgttccattgttgcatgtttgatagatgactagcggtgttgattttatggtttagtgcttcatgttgtatgttgtgccttgctgctcccagtaataatgatgcaaggtgctatttcgggttaaaaaaaaaaaaaaa

SEQ ID NO: 1140 - protein, 350 aa, Triticum aestivum
MAAAANGGGGETKAAFARIYDALKAELLRDPAFEYTESSHQWIDRMLDYNVLGGKCNRGLSVVDSYKLLKGVDVLTEEEMFLASTLGWCIEWLQAFFLVLDDIMDDSHTRRGQPCWFRVPQVGFIAVNDGILLRNHISRMLRLHFKKKPYYADLLDLFNEVEFKTASGQMLDLITTHEGEKDLTKYNIGVHRRIVQFKTAYYSFYLPVACALLLSGESLENYGAVENILVEMGTYFQVQDDYLDCYGDPEFIGKIGTDIEDYKCSWLVVQALEHADESQKSILFENYGKKDPACVAKVKDLYKELNLEAVFHEYESESYKKLIADIEAQPSVPVQKVLKSFLHKIYMRQK

SEQ ID NO: 1141 - DNA, 1259 bp, Hordeum vulgare
  CDS (43)..(1107)
gaaatctccgctccttctcgtcccttctcgctcgcgtgcgcaatggcggcggcggcggtggcgttgtcgaacggctccggtggcgactccaaggccgagttcgcggaaatatacagcaggctcaaggaggagatgctcgaggaccccgccttcgagttcaccgacgagtccctccagtggatcgaccgcatgctggattacaatgtcctaggaggaaagtgcaaccgtgggctctctgtcattgatagctacaagacattgaaaggtgtagatgttttgagcaaggaggagacgtttcttgcctgcacccttggttggtgtattgaatggcttcaagcatattttcttgtgcttgatgatatcatggacaactcccagacacgacggggccagccttgctggtttagggtgcctcaggttggccttattgctgtaaacgatgggattatccttcgcaaccatatttcacggattcttcaacgccacttcagaggaaaaccgtattatgttgatctcattgatttgttcaatgaggttgagttcaagacagcttcagggcagttgttggatcttatcactactcacgagggagaaaaggatctcacaaaatataacttgaatgttcaccggcgcattgtgcaatacaagacagcgtactattcattttatcttccggttgcatgtgcattgctgctgtcgggtgagaatttggataacttcggcgatgtaaagaacattcttgttgaaatgggaacatactttcaagtccaggatgattatctagattgttttggagatcctgaatctattggcaagattggaactgacattgaagactacaagtgttcctggttagttgtgcaagctcttgaccatgcagatgagagccaaaagcgcattctacttgaaaattatggaaagtcagatccagagtctgttgcaaaagtgaaggatctgtataaagaacttgatctggagacggcatttcacaagtatgagcgtgagagctacaataagctgatcaccgacattgaggcccagccaagcaaagctgttcagaaagttttgatgtccttcttggagaagatctacaagaggcagaagtaggctaagcttgtggacaaattagtaacttgttctatgttcttctgcgtgtgatggtcatcttatttcagtactgtacagtacatcatggtattattccttccaacaataaatatttgggccctgtttggatcaaaaagaaaaaaaaaaaaaaa

SEQ ID NO: 1142 - protein, 354 aa, Hordeum vulgare
MAAAAVALSNGSGGDSKAEFAEIYSRLKEEMLEDPAFEFTDESLQWIDRMLDYNVLGGKCNRGLSVIDSYKTLKGVDVLSKEETFLACTLGWCIEWLQAYFLVLDDIMDNSQTRRGQPCWFRVPQVGLIAVNDGIILRNHISRILQRHFRGKPYYVDLIDLFNEVEFKTASGQLLDLITTHEGEKDLTKYNLNVHRRIVQYKTAYYSFYLPVACALLLSGENLDNFGDVKNILVEMGTYFQVQDDYLDCFGDPESIGKIGTDIEDYKCSWLVVQALDHADESQKRILLENYGKSDPESVAKVKDLYKELDLETAFHKYERESYNKLITDIEAQPSKAVQKVLMSFLEKIYKRQK

SEQ ID NO: 1143 - DNA, 1482 bp, Hordeum vulgare
  CDS (34)..(1092)
tgtttccccgctagctgcgtccgagccggggcaatggcggcggcggcggcggcgaacggcgggggcggggacaccaaggcggcgttcgcgcggatctacgacgcgctcaaggaggagctgctcagggaccccgccttcgactacaccgagtcgtcgcaccagtggatcgaccgcatgctggactacaatgtactgggaggaaaatgcaaccgtgggctctccgtggtcgatagctataagctgttgaaaggtgtggatgctcttactgaggaggagatgtttcttgcctccactctcggttggtgcattgaatggcttcaagccttctttcttgtgctcgacgatatcatggacgactcccacactcgacgtgggcagccttgttggtttagggtgcctcaggttggcttcattgctgtaaatgatgggatcctccttcgcaaccatatttcgagaatgcttcggcttcactttaagaagaagccttactatgccgatctccttgatttattcaacgaggttgagttcaagacagcttctggtcaaatgctggaccttattacaacccacgagggagaaaaagatctaacgaaatataacattggagttcaccgccgaattgttcaattcaagacagcctactattcattttatttgccggttgcatgtgcgctgctactctcaggtgaaaacttggagaactacggtgctgtagagaacatacttgttgagatgggaacttacttccaagttcaggatgattatctagattgttatggtgatcccgaatttattggcaagattggcaccgacattgaagattacaagtgctcctggctagttgtccaagctcttgagcgtgctgacgagagccaaaagagcattctatttgaaaactatggaaagaaagatccagcatgtgtggcaaaagtgaaggatctctacaaagaacttaaccttgaggggttatttcatgagtatgagagcgagagctacaagaagctgatcactgatatcgaagcccagccaagcattgctgttcagaaggttctgaagtccttcttgcacaagatctacaagaggcagaagtagggttgcctcttcgacaggagatctgttccgtcgttgcatgtttgatagatgcatagggtgttgaatcatggtttagtgcttcatgttgtatgtcgcgccttgctgcccccaataataatgatgcaaggcgctattccgggtttgatggaccgctttggtgtagactgatggttctgtaatttgcaccctaccctgtcgtttggtcttttcttgtattgttgcattagaggagttagcaggtgtattcccatggtagttcttcaagttactgttaaggaaaatcatcaatgctaaaatagacatgaaatcaggtggatgtaagatgaatttgtgctctttttttttacatgtagctgaatgcttgggattacccccaaaaaaaaaaaaaaa

SEQ ID NO: 1144 - protein, 352 aa, Hordeum vulgare
MAAAAAANGGGGDTKAAFARIYDALKEELLRDPAFDYTESSHQWIDRMLDYNVLGGKCNRGLSVVDSYKLLKGVDALTEEEMFLASTLGWCIEWLQAFFLVLDDIMDDSHTRRGQPCWFRVPQVGFIAVNDGILLRNHISRMLRLHFKKKPYYADLLDLFNEVEFKTASGQMLDLITTHEGEKDLTKYNIGVHRRIVQFKTAYYSFYLPVACALLLSGENLENYGAVENILVEMGTYFQVQDDYLDCYGDPEFIGKIGTDIEDYKCSWLVVQALERADESQKSILFENYGKKDPACVAKVKDLYKELNLEGLFHEYESESYKKLITDIEAQPSIAVQKVLKSFLHKIYKRQK

SEQ ID NO: 1145 - DNA, 1222 bp, Zea mays
  CDS (146)..(1213)
tgcgtgtcggtctctccagatcagcagcgcctccctctgcggctctgcctcttgccaaagccccccacagaattcttctccctccccgtctcctctcgcgctcgcgcgtggtgaggtgaggtggagttccgaccccgaggccgcaatggcgacagcggaggtggtggtggccaacggctcgggcggcgccgacaccaagaccgcgtttaaggagatatacagcaagctcaagcaggagatgctcgaggaccccgccttcgaattcactgacgagtcgctccagtggatcgaccgcatgttggattacaatgtgcttggaggaaagtgcaatcgtgggctatctgttgtcgatagctacaagattttgaagggtgttgacgttctgagcaaggaggagacatttctggcctgcacccttggctggtgtattgaatggcttcaagcttattttcttgtgcttgatgatattatggacaactcccagacacggcgtggccagccttgctggtttagagtgccacaggttggtctcattgcagtaaatgatgggattatccttcgcaatcatatctcacgaatccttcaacgccacttcaaaggaaagccatattatgttgatatcattgacttgttcaacgaggttgagttcaagacagcttcagggcaaatgttggatcttatcactacccacgagggtgaaaaggatctaactaaatataacttgacagttcaccgccgcatcgttcagtacaagacagcttattattcattctaccttcctgttgcatgtgcattgctgctggctggtgagaacttggaaaactttgttgatgtaaagaacattctcgttgaaatgggaacatactttcaagttcaggatgactatctagattgttttggtgatcctgaattcattggcaagatcggaactgacattgaagactacaaatgttcctggctagttgtgcaagctcttgagcgtgctgctgagaaccaaaagagcattctgtttgaaaattacggaaagtctgatccagcgtgtgttgcaaaggtgaaggacttgtacaaagagcttaaactggaggaggttttccatgagtacgagagggagagttacaacaagctgattgccgacatcgaggcccagccgagcaaggcagtccaaactgttttgaagtccttccttcacaagatctacaagagggacaagtagacccagatc

SEQ ID NO: 1146 - protein, 355 aa, Zea mays; identical to SEQ ID NO: 1016

SEQ ID NO: 1147 - DNA, 26 bp, Artificial sequence
  primer
atggcttcagaaaaagaaattaggag

SEQ ID NO: 1148 - DNA, 26 bp, Artificial sequence
  primer
ctatttgcttctcttgtaaactttgt

SEQ ID NO: 1149 - protein, 390 aa, Artificial sequence
  consensus sequence
  Variant (2)..(7): Xaa in position 2 to 7 is any amino acid
  Variant (8)..(8): Xaa in position 8 is any or no amino acid
  Variant (10)..(24): Xaa in position 10 to 24 is any amino acid
  Variant (25)..(29): Xaa in position 25 to 29 is any or no amino acid
  Variant (31)..(31): Xaa in position 31 is any amino acid
  Variant (32)..(34): Xaa in position 32 to 34 is any or no amino acid
  Variant (36)..(36): Xaa in position 36 is any amino acid
  Variant (39)..(40): Xaa in position 39 to 40 is any amino acid
  Variant (41)..(66): Xaa in position 41 to 66 is any or no amino acid
  Variant (70)..(70): Xaa in position 70 is any amino acid
  Variant (77)..(77): Xaa in position 77 is any amino acid
  Variant (79)..(82): Xaa in position 79 to 82 is any amino acid
  Variant (84)..(87): Xaa in position 84 to 87 is any amino acid
  Variant (88)..(96): Xaa in position 88 to 96 is any or no amino acid
  Variant (98)..(99): Xaa in position 98 to 99 is any amino acid
  Variant (100)..(102): Xaa in position 100 to 102 is any or no amino acid
  Variant (104)..(109): Xaa in position 104 to 109 is any amino acid
  Variant (113)..(114): Xaa in position 113 to 114 is any amino acid
  Variant (116)..(116): Xaa in position 116 is any amino acid
  Variant (120)..(120): Xaa in position 120 is any amino acid
  Variant (124)..(124): Xaa in position 124 is any amino acid
  Variant (130)..(130): Xaa in position 130 is any amino acid
  Variant (132)..(132): Xaa in position 132 is any amino acid
  Variant (141)..(141): Xaa in position 141 is any amino acid
  Variant (143)..(145): Xaa in position 143 to 145 is any amino acid
  Variant (148)..(148): Xaa in position 148 is any amino acid
  Variant (151)..(151): Xaa in position 151 is any amino acid
  Variant (154)..(156): Xaa in position 154 to 156 is any amino acid
  Variant (158)..(160): Xaa in position 158 to 160 is any amino acid
  Variant (162)..(164): Xaa in position 162 to 164 is any amino acid
  Variant (166)..(168): Xaa in position 166 to 168 is any amino acid
  Variant (170)..(173): Xaa in position 170 to 173 is any amino acid
  Variant (176)..(176): Xaa in position 176 is any amino acid
  Variant (179)..(180): Xaa in position 179 to 180 is any amino acid
  Variant (183)..(183): Xaa in position 183 is any amino acid
  Variant (186)..(188): Xaa in position 186 to 188 is any amino acid
  Variant (190)..(191): Xaa in position 190 to 191 is any amino acid
  Variant (194)..(195): Xaa in position 194 to 195 is any amino acid
  Variant (200)..(205): Xaa in position 200 to 205 is any amino acid
  Variant (208)..(208): Xaa in position 208 is any amino acid
  Variant (210)..(212): Xaa in position 210 to 212 is any amino acid
  Variant (213)..(217): Xaa in position 213 to 217 is any or no amino acid
  Variant (220)..(220): Xaa in position 220 is any amino acid
  Variant (234)..(234): Xaa in position 234 is any amino acid
  Variant (237)..(239): Xaa in position 237 to 239 is any amino acid
  Variant (241)..(252): Xaa in position 241 to 252 is any amino acid
  Variant (253)..(260): Xaa in position 253 to 260 is any or no amino acid
  Variant (262)..(264): Xaa in position 262 to 264 is any amino acid
  Variant (266)..(266): Xaa in position 266 is any amino acid
  Variant (270)..(270): Xaa in position 270 is any amino acid
  Variant (278)..(278): Xaa in position 278 is any amino acid
  Variant (280)..(280): Xaa in position 280 is any amino acid
  Variant (283)..(283): Xaa in position 283 is any amino acid
  Variant (292)..(292): Xaa in position 292 is any amino acid
  Variant (294)..(294): Xaa in position 294 is any amino acid
  Variant (300)..(302): Xaa in position 300 to 302 is any amino acid
  Variant (305)..(310): Xaa in position 305 to 310 is any amino acid
  Variant (312)..(314): Xaa in position 312 to 314 is any amino acid
  Variant (316)..(317): Xaa in position 316 to 317 is any amino acid
  Variant (321)..(322): Xaa in position 321 to 322 is any amino acid
  Variant (324)..(329): Xaa in position 324 to 329 is any amino acid
  Variant (332)..(333): Xaa in position 332 to 333 is any amino acid
  Variant (335)..(336): Xaa in position 335 to 336 is any amino acid
  Variant (338)..(338): Xaa in position 338 is any amino acid
  Variant (340)..(345): Xaa in position 340 to 345 is any amino acid
  Variant (348)..(353): Xaa in position 348 to 353 is any amino acid
  Variant (354)..(357): Xaa in position 354 to 357 is any or no amino acid
  Variant (359)..(368): Xaa in position 359 to 368 is any amino acid
  Variant (369)..(376): Xaa in position 369 to 376 is any or no amino acid
  Variant (378)..(380): Xaa in position 378 to 380 is any amino acid
  Variant (383)..(383): Xaa in position 383 is any amino acid
  Variant (389)..(389): Xaa in position 389 is any amino acid
FXXXXXXXLXXXXXXXXXXXXXXXXXXXXWXXXXLXYNXXXXXXXXXXXXXXXXXXXXXXXXXXXXGGKXNRGLSVXDXXXXLXXXXXXXXXXXXXLXXXXXEXXXXXXLGWXXEXLQAXFLVXDDIMDXSXTRRGQPCWXRXXXVGXIAXNDXXXLXXXIXXXLXXXFXXXXYYXDLXXLFXEVXXXTXXGQXXDLITXXXXXXDLXKXXXXXXXXIVXYKTAYYSFYLPVAXALXXXGXXXXXXXXXXXXXXXXXXXXLXXXGXYFQXQDDYLDCXGXPEXIGKIGTDIXDXKCSWLXXXALXXXXXXQXXXLXXNYGXXDXXXXXXVKXXYXXLXLXXXXXXYEXXXXXXXXXXIXXXXXXXXXXXXXXXXXXVXXXFLXKIYKRXK

SEQ ID NO: 1150 - protein, 41 aa, Artificial sequence
  protein pattern
  Variant (4)..(5): Xaa in position 4 to 5 is any amino acid
  Variant (7)..(7): Xaa in position 7 is any amino acid
  Variant (11)..(11): Xaa in position 11 is Phe or Tyr
  Variant (15)..(15): Xaa in position 15 is any amino acid
  Variant (18)..(18): Xaa in position 18 is Ile, Leu or Met
  Variant (21)..(21): Xaa in position 21 is any amino acid
  Variant (23)..(23): Xaa in position 23 is any amino acid
  Variant (28)..(28): Xaa in position 28 is any amino acid
  Variant (32)..(32): Xaa in position 32 is Phe or Tyr
  Variant (33)..(36): Xaa in position 33 to 36 is any amino acid
  Variant (39)..(39): Xaa in position 39 is any amino acid
  Variant (40)..(40): Xaa in position 40 is Ile, Met or Val
LGWXXEXLQAXFLVXDDXMDXSXTRRGXPCWXXXXXVGXXA

SEQ ID NO: 1151 - protein, 35 aa, Artificial sequence
  protein pattern
  Variant (2)..(2): Xaa in position 2 is Ile, Leu or Val
  Variant (3)..(3): Xaa in position 3 is Asp, Glu, Pro or Gln
  Variant (4)..(4): Xaa in position 4 is Leu or Met
  Variant (6)..(6): Xaa in position 6 is any amino acid
  Variant (10)..(10): Xaa in position 10 is any amino acid
  Variant (14)..(14): Xaa in position 14 is Phe or Tyr
  Variant (17)..(18): Xaa in position 17 to 18 is any amino acid
  Variant (20)..(20): Xaa in position 20 is any amino acid
  Variant (22)..(23): Xaa in position 22 to 23 is any amino acid
  Variant (29)..(29): Xaa in position 29 is Ser or Thr
  Variant (32)..(32): Xaa in position 32 is any amino acid
  Variant (34)..(34): Xaa in position 34 is any amino acid
LXXXGXYFQXQDDXLDXXGXPXXIGKIGXDIXDXK

SEQ ID NO: 1152 - protein, 26 aa, Artificial sequence
  protein pattern
  Variant (3)..(3): Xaa in position 3 is any amino acid
  Variant (4)..(4): Xaa in position 4 is Phe or Tyr
  Variant (14)..(14): Xaa in position 14 is Ala, Pro or Ser
  Variant (17)..(17): Xaa in position 17 is any amino acid
  Variant (18)..(25): Xaa in position 18 to 25 is any or no amino acid
IVXXKTAYYSFYLXVAXXXXXXXXXA

SEQ ID NO: 1153 - protein, 25 aa, Artificial sequence
  protein pattern
  Variant (2)..(3): Xaa in position 2 to 3 is any or no amino acid
  Variant (5)..(5): Xaa in position 5 is any amino acid
  Variant (6)..(6): Xaa in position 6 is any or no amino acid
  Variant (10)..(10): Xaa in position 10 is any amino acid
  Variant (14)..(14): Xaa in position 14 is Leu or Met
  Variant (15)..(15): Xaa in position 15 is Ala or Ser
  Variant (17)..(17): Xaa in position 17 is Ile, Pro or Val
  Variant (18)..(18): Xaa in position 18 is Asp or Glu
  Variant (19)..(19): Xaa in position 19 is Ser or Thr
  Variant (20)..(22): Xaa in position 20 to 22 is any amino acid
  Variant (24)..(24): Xaa in position 24 is any amino acid
  Variant (25)..(25): Xaa in position 25 is Ala, Asp, Glu, Gly, Asn or Gln
LXXNXXGGKXNRGXXVXXXXXXLXX

SEQ ID NO: 1154 - protein, 28 aa, Artificial sequence
  protein pattern
  Variant (2)..(2): Xaa in position 2 is Gly, Ser or Thr
  Variant (4)..(4): Xaa in position 4 is any amino acid
  Variant (5)..(5): Xaa in position 5 is Phe, Ile or Val
  Variant (6)..(6): Xaa in position 6 is Ala, Asn or Val
  Variant (7)..(7): Xaa in position 7 is any amino acid
  Variant (9)..(9): Xaa in position 9 is Leu or Met
  Variant (10)..(12): Xaa in position 10 to 12 is any amino acid
  Variant (13)..(13): Xaa in position 13 is Ala, Asp, Asn, Ser or Thr
  Variant (14)..(19): Xaa in position 14 to 19 is any amino acid
  Variant (21)..(22): Xaa in position 21 to 22 is any amino acid
  Variant (26)..(27): Xaa in position 26 to 27 is any amino acid
  Variant (28)..(28): Xaa in position 28 is Asp, Glu, Asn or Arg
CXWXXXXAXXXXXXXXXXXLXXNYGXXX

SEQ ID NO: 1155 - protein, 18 aa, Artificial sequence
  protein pattern
  Variant (3)..(3): Xaa in position 3 is Ala, Gly or Ser
  Variant (4)..(4): Xaa in position 4 is Phe, Ile, Leu or Val
  Variant (5)..(5): Xaa in position 5 is Ile, Leu, Met or Val
  Variant (7)..(7): Xaa in position 7 is Glu, Lys or Arg
  Variant (8)..(9): Xaa in position 8 to 9 is any amino acid
  Variant (11)..(12): Xaa in position 11 to 12 is any amino acid
  Variant (13)..(13): Xaa in position 13 is Phe, Ile, Leu or Met
  Variant (14)..(14): Xaa in position 14 is Phe, Ile or Leu
  Variant (15)..(17): Xaa in position 15 to 17 is any amino acid
NDXXXLXXXIXXXXXXXF

SEQ ID NO: 1156 - DNA, 1776 bp, Saccharomyces cerevisiae
  CDS (1)..(1776)
atgctaaaatacaaacctttactaaaaatctcgaagaactgtgaggctgctatcctcagagcgtctaagactagattgaacacaatccgcgcgtacggttctaccgttccaaaatccaagtcgttcgaacaagactcaagaaaacgcacacagtcatggactgccttgagagtcggtgcaattctagccgctactagttccgtggcgtatctaaactggcataatggccaaatagacaacgagccgaaactggatatgaataaacaaaagatttcgcccgctgaagttgccaagcataacaagcccgatgattgttgggttgtgatcaatggttacgtatacgacttaacgcgattcctaccaaatcatccaggtgggcaggatgttatcaagtttaacgccgggaaagatgtcactgctatttttgaaccactacatgctcctaatgtcatcgataagtatatagctcccgagaaaaaattgggtccccttcaaggatccatgcctcctgaacttgtctgtcctccttatgctcctggtgaaactaaggaagatatcgctagaaaagaacaactaaaatcgctgctacctcctctagataatattattaacctttacgactttgaatacttggcctctcaaactttgactaaacaagcgtgggcctactattcctccggtgctaacgacgaagttactcacagagaaaaccataatgcttatcataggatttttttcaaaccaaagatccttgtagatgtacgcaaagtagacatttcaactgacatgttgggttctcatgtggatgttcccttctacgtgtctgctacagctttgtgtaaactgggaaaccccttagaaggtgaaaaagatgtcgccagaggttgtggccaaggtgtgacaaaagtcccacaaatgatatctactttggcttcatgttcccctgaggaaattattgaagcagcaccctctgataaacaaattcaatggtaccaactatatgttaactctgatagaaagatcactgatgatttggttaaaaatgtagaaaagctgggtgtaaaggcattatttgtcactgtggatgctccaagtttaggtcaaagagaaaaagatatgaagctgaaattttccaatacaaaggctggtccaaaagcgatgaagaaaactaatgtagaagaatctcaaggtgcttcgagagcgttatcaaagtttattgacccctctttgacttggaaagatatagaagagttgaagaaaaagacaaaactacctattgttatcaaaggtgttcaacgtaccgaagatgttatcaaagcagcagaaatcggtgtaagtggggtggttctatccaatcatggtggtagacaattagatttttcaagggctcccattgaagtcctggctgaaaccatgccaatcctggaacaacgtaacttgaaggataagttggaagttttcgtggacggtggtgttcgtcgtggtacagatgtcttgaaagcgttatgtctaggtgctaaaggtgttggtttgggtagaccattcttgtatgcgaactcatgctatggtcgtaatggtgttgaaaaagccattgaaattttaagagatgaaattgaaatgtctatgagactattaggtgttactagcattgcggaattgaagcctgatcttttagatctatcaacactaaaggcaagaacagttggagtaccaaacgacgtgctgtataatgaagtttatgagggacctactttaacagaatttgaggatgcatga

SEQ ID NO: 1157 - protein, 591 aa, Saccharomyces cerevisiae
MLKYKPLLKISKNCEAAILRASKTRLNTIRAYGSTVPKSKSFEQDSRKRTQSWTALRVGAILAATSSVAYLNWHNGQIDNEPKLDMNKQKISPAEVAKHNKPDDCWVVINGYVYDLTRFLPNHPGGQDVIKFNAGKDVTAIFEPLHAPNVIDKYIAPEKKLGPLQGSMPPELVCPPYAPGETKEDIARKEQLKSLLPPLDNIINLYDFEYLASQTLTKQAWAYYSSGANDEVTHRENHNAYHRIFFKPKILVDVRKVDISTDMLGSHVDVPFYVSATALCKLGNPLEGEKDVARGCGQGVTKVPQMISTLASCSPEEIIEAAPSDKQIQWYQLYVNSDRKITDDLVKNVEKLGVKALFVTVDAPSLGQREKDMKLKFSNTKAGPKAMKKTNVEESQGASRALSKFIDPSLTWKDIEELKKKTKLPIVIKGVQRTEDVIKAAEIGVSGVVLSNHGGRQLDFSRAPIEVLAETMPILEQRNLKDKLEVFVDGGVRRGTDVLKALCLGAKGVGLGRPFLYANSCYGRNGVEKAIEILRDEIEMSMRLLGVTSIAELKPDLLDLSTLKARTVGVPNDVLYNEVYEGPTLTEFEDA

SEQ ID NO: 1158 - DNA, 1552 bp, Oryza sativa
  CDS (16)..(1509)
cacaacaacacaaagatgctcaagttcgacgaggttcaaaaacacaactcgcgcgagtcgtgctgggtggtggtgcacggcaacgcgtacgacgtgaccgagttcctccccgaccacccgggcggagcgggcatcatcctcaagtatgccggcaaggacgccacggaggagtacgaccccatccacccgcccggtacgctcgaggaaaatctgcccaaggaaaagtgtctcggccccgtagacccctcgacgatcaagaaggaggagaaggtggagaagaagcaggtggtcaaggatgaggggggcgtgccgccgctgtcgcagtgtctcaatctgtacgactttgaggtgatcgcaaagagggtgcttaagccgacggcttgggcgtactactcgagcggtgccgatgacgaagtcaccatgcgcgagaatacctcggcgtttggaaggatctggttccgacccaggattctcagggacgtcagcaaggtcgatttctccacctcgctgcttggtcagaaatccaccctgccggtctacatcaccgccaccgccctcggcaagctgggccaccccgatggagagaagaacttgaccgtggcggcgggtaaagagggtgtgattcagatgatccccacgctggcctcgtgttcgtttgacgagattgtggccgccaagacgcacgatgcccaggtgcagttcatgcagctctacgtcaactcgaaccgcgccatcaccgaaaacatcattgccaaggccgaaaaggcgggcatcaaggggcttttcgtcaccgtcgatgcgccccagctcggacgcagggagaaggatatgcgcatgaagttcgacgatgtcggcagcgatatgcagaaccagaacaaggacaacgtggatcgatcccagggcgcagcacgcgccatctcgagcttcatcgacccctcgctcagttgggacgacctcacctggttgcgatcggtcaccaaaatgccgattgtgctcaagggcgttcagacgtgggaaaacgccgtacgtgccgccgaactcggtctgagcggtgtggtgctctccaaccacggcggtcgacaactcgactttgcgcgctccggtatcgaggtgctcggcgaagtggtcgaagcgctcaaggccaagggactcttccccaaccccatgttccagatctttgtcgacggcggtattcgccgcgccagcgatgtcctcaaggccgtagctatgggtgctacagccgtgggtatcggtaggccgttcttgtatgcctactcggcgtacggaagcgatggtgtcgtgcatgcgttgcagctgctcaaggccgagatggagatgaacatgcggctgctcggcgcgcctacgctcaaggacgtcgtgcccgagatggtggatgccagggctctgggaacgcacgtcaactttacgcccgtgtcgcatggacaccagatctacgaaaagctccagactgcggtgggcatgcccggcgaaccggccaacaagctttagaaccgaccatccgcactgtatgcaatgatcatgtaatttgtcg

SEQ ID NO: 1159 - protein, 497 aa, Oryza sativa
MLKFDEVQKHNSRESCWVVVHGNAYDVTEFLPDHPGGAGIILKYAGKDATEEYDPIHPPGTLEENLPKEKCLGPVDPSTIKKEEKVEKKQVVKDEGGVPPLSQCLNLYDFEVIAKRVLKPTAWAYYSSGADDEVTMRENTSAFGRIWFRPRILRDVSKVDFSTSLLGQKSTLPVYITATALGKLGHPDGEKNLTVAAGKEGVIQMIPTLASCSFDEIVAAKTHDAQVQFMQLYVNSNRAITENIIAKAEKAGIKGLFVTVDAPQLGRREKDMRMKFDDVGSDMQNQNKDNVDRSQGAARAISSFIDPSLSWDDLTWLRSVTKMPIVLKGVQTWENAVRAAELGLSGVVLSNHGGRQLDFARSGIEVLGEVVEALKAKGLFPNPMFQIFVDGGIRRASDVLKAVAMGATAVGIGRPFLYAYSAYGSDGVVHALQLLKAEMEMNMRLLGAPTLKDVVPEMVDARALGTHVNFTPVSHGHQIYEKLQTAVGMPGEPANKL

SEQ ID NO: 1160 - DNA, 1506 bp, Neurospora crassa
  CDS (1)..(1506)
atggctccccaaacaccactgaccggcgtcgaggtcgccaagcacaacacccaggatgactgctgggtcattgtccacggcaaggcctacgacatcacagagttcctccccgagcaccccggtggcatgaagatcatcctcaagtatgccggcaaggatgctaccgaggagtttgatcccatccatcccccagacactctcgagaagtacctggccaaggacaagcacctgggccccgtcgacatgtccaccgtcgtgactgagaaggccgaggttgatcccgaggagcaggcgcgcttgaagcgcattgaggagatgcccttgctcgagcagtgctacaacctgcttgactttgaggcggtggccaagagggttatgaagaagaatgcctgggcttactactctagcgcggcggatgatgaaattactcttcgcgaaaaccacgccgccttccatcgtatctggttccgccccaaggttctcgttgatgtcgaaaaggtcgacttcagcaccacgatgctcggaaccaaggttgatattcccttctacgtcacggccactgcccttggcaagctcggccacgttgagggcgaggttctgctcactcgcgccgccaagaagcacaacgtcgtccagatgatccccactctcgcctcctgcgcctttgacgagatcatggacgccgccgagggcgatcaagtccagtggctgcagctctacgtcaacaaggaccgcgccatcaccgaacgcatcatcaagcacgccgaaaagcgcggctgcaaggccctcttcatcaccgtcgatgcgccccagctcggtcgtcgtgagaaggacatgcgcgtcaagttcaccgacgacggcagcaacgtccagaagggccatgagaccaatcgcaacgagggtgcggcccgcgccatcagcagcttcatcgaccccgccctcagctggaaggacattccctggttccagagcgtcaccaagatgcccatcatcctcaagggcgtccagcgcgtcgaggatgtgatcaaggccgttgaggccggcgtgcagggtgttgtcctgtccaaccacggtggtcgccagctcgagttcgcccgctcgggcattgaggttctcgccgagaccatgccggtgctgcgcgagctcggcctggaggacaagatcgaggtctacatcgacggcggcatccgtcgcgccaccgacattctcaaggccctctgcctgggcgccaagggtgtcggtatcggtcgccccttcctgtacgccatgtcggcgtacggattcgatggtgttgaccgcgccatgcagctgctcaaggacgagatggagatgaacatgcgcctgattggcgcgaccaagatcgaggacctcaaccccggcatgctggatctcaggagtctatacaaccacggcgcgccgccaacggatacgctgtcgaacatctcgtatgatgctttgattagcccggcccagagggtcaagtttgcggaaaagtccaagatctag

SEQ ID NO: 1161 - protein, 501 aa, Neurospora crassa
MAPQTPLTGVEVAKHNTQDDCWVIVHGKAYDITEFLPEHPGGMKIILKYAGKDATEEFDPIHPPDTLEKYLAKDKHLGPVDMSTVVTEKAEVDPEEQARLKRIEEMPLLEQCYNLLDFEAVAKRVMKKNAWAYYSSAADDEITLRENHAAFHRIWFRPKVLVDVEKVDFSTTMLGTKVDIPFYVTATALGKLGHVEGEVLLTRAAKKHNVVQMIPTLASCAFDEIMDAAEGDQVQWLQLYVNKDRAITERIIKHAEKRGCKALFITVDAPQLGRREKDMRVKFTDDGSNVQKGHETNRNEGAARAISSFIDPALSWKDIPWFQSVTKMPIILKGVQRVEDVIKAVEAGVQGVVLSNHGGRQLEFARSGIEVLAETMPVLRELGLEDKIEVYIDGGIRRATDILKALCLGAKGVGIGRPFLYAMSAYGFDGVDRAMQLLKDEMEMNMRLIGATKIEDLNPGMLDLRSLYNHGAPPTDTLSNISYDALISPAQRVKFAEKSKI

SEQ ID NO: 1162 - DNA, 1485 bp, Magnaporthe grisea
  Magnaporthe grisea 70-15
  CDS (1)..(1485)
atgcctttgacgggcgcagaggttgccaaacacgacagtagccagtcgtgttgggtaattgttcacggcaaggcctacgatgttaccgagtttcttccagagcacccaggtggtgccaagataatcctcaaatatgccgggaaagatgcaactgaggagttcgacccgatccatccaccggatacgctcgacaagtatctggataaatctaagcacatgggtcccgtcgatatgtcgaccgtagcccatgttcagaaggcagctgacccagaggaggaagcaagactgcgtagggtcgctgacataccactgctggagcaatgctacaaccttctcgattttgaggctgttgctcgcagggtaatgaagaagactgcttggggttactactcaagcgcagcagatgacgagattacattccgcgaaaaccactccgctttccacaggatctggttcaggcccaaagtccttgtcgacgtcgagaatgtggatgtctccaccacgatgctgggtacaaaaacggctcttcccttctacgttacggcgacagcccttggcaagcttggaaaccctgagggagaggtttgtttgacaaaagcagctggcaagcacaacgttattcagatgattcccacgctggcatcctgtgcctttgacgagatcatggatgcggcagtgccgggccaggttcagtggctacagttgtatgtgaacaaagaccgcgaagtcacgaagcgcattgtgcagtatgcggagaaaaggggctgcaagggcctcttcatcacggtcgatgcgccgcaactcggcaggagagaaaaggacatgcgatccaaattcgaagaccccggaaccagcgtccagcaaggccaaaccacagacaactcacagggcgcagcacgtgccatatccagctttatcgatccggcgttgtcgtggaaggacctcccgtggttccgcagtattaccaagatgcctatcgtgctcaagggcgtccaaagggtcgaggatgtgctgaaggccgtcgatgcaggtatggatggcgtcattttgtccaaccacggcggtcggcagcttgaatttgctcgctcggggattgagatcctggccgagacgatgccggttttgcgcagcatgggtctccaggacaagatcgaggtttatctcgacggtggagtccgacgcgggacggacatcatcaaggccctctgtcttggggccaagggggttggcatcggaaggccattcctctacgccatgtcggcgtatggagtccagggcgtcgaccgagccatgcagctactcaaagatgagctggagatgaacatgcggctcattggctgtacgagcatcgaccagcttagtccttcgctggttgacaccaagagcctcacgtaccatggaaacggcacgccgattgataacctgtctcacagcatctacgaccctctggcaaatccgcctcaaagaactggagcaaagttataa

SEQ ID NO: 1163 - protein, 494 aa, Magnaporthe grisea
  Magnaporthe grisea 70-15
MPLTGAEVAKHDSSQSCWVIVHGKAYDVTEFLPEHPGGAKIILKYAGKDATEEFDPIHPPDTLDKYLDKSKHMGPVDMSTVAHVQKAADPEEEARLRRVADIPLLEQCYNLLDFEAVARRVMKKTAWGYYSSAADDEITFRENHSAFHRIWFRPKVLVDVENVDVSTTMLGTKTALPFYVTATALGKLGNPEGEVCLTKAAGKHNVIQMIPTLASCAFDEIMDAAVPGQVQWLQLYVNKDREVTKRIVQYAEKRGCKGLFITVDAPQLGRREKDMRSKFEDPGTSVQQGQTTDNSQGAARAISSFIDPALSWKDLPWFRSITKMPIVLKGVQRVEDVLKAVDAGMDGVILSNHGGRQLEFARSGIEILAETMPVLRSMGLQDKIEVYLDGGVRRGTDIIKALCLGAKGVGIGRPFLYAMSAYGVQGVDRAMQLLKDELEMNMRLIGCTSIDQLSPSLVDTKSLTYHGNGTPIDNLSHSIYDPLANPPQRTGAKL

SEQ ID NO: 1164 - DNA, 1509 bp, Gibberella zeae
  Gibberella zeae PH-1
  CDS (1)..(1509)
atggtgttaaagggcggcgaggttgctgagcacaacagtgcggattcgtgctgggttattgttcatggcaaagcatacgatgtcacagagtttctaccagagcatcctggaggtaaaaagattatcctcaagtacgctggcaaagatgccactgaagcatacgaacccatccaccctcctgacactctcgacaagttcctcgaggcctccaagcatctcggacctgtcgacatgaacaccgtccagcaggagaccaaggaggtggaccccgaggaggaggagcgtctgcagcgcatggagcagaagcctctattgtcgcaatgctacaacctcttcgactttgaggctgttgctaggcgcgtcatgagcaaggttgcgtggggatactactcaagtgctgctgacgatgagattacaatgcgcgagaaccacagcgcattccaccgaatctggttccgtcctcaaatcctcgttgatgtcgagaatattgacttctcaaccactatgcttggcacaaaaaccgacatccccgtttacgtgacagccacagctcttggcaaactgggtaacccagagggtgaagttgtgcttacccgcgctgcagccaagcacaacgtcattcagatgattcccaccctcgcatcctgttcatttgacgagatcgttgacgccaaagctggtgaccaggtccagtggctgcagctttacgtcaacaaggaccgagctatcacgaagaagattgtgcagcatgctgagaagcgtggctgtaagggtctctttatcacagttgatgcccctcaacttggtcgacgtgagaaggatatgcgatccaagttcactgaccctggctctcatgtccaggagggtaccgacacagataacagccagggcgcggcgcgagccatttcgacttttatcgaccctgctctgagctggaaggatatcgcttggttccagagcatcacctccatgccaattatcctcaagggtgttcagcgcgttgaggatgttctcaaggctattgactacggttgccagggtgtcgtgctatccaaccacggtggccgacagctcgagtttgcgcgatctgctattgaagttcttgccgagactatgcccattctccgtgagcgcggtcttgaaaacaagatcgagatcttcatcgacggtggtatccgacgtggaactgatatcctcaaggcgctctgcctcggcgcccgtggtgttggtatcggacgacctttcctctacgccatgagcacatatggcgaagctggtgtcatccgagctatgcagcttctcaaggatgagctcgagatgaacatgcgacttatcggcgcgagcaagattgaagacctacaccctggtatgctcgatctccgaagtctgttccagcacggtgctgtgccttcggacaacctgtcgtctactgtgtacgaccctctggctgtgcctgcgcagagacccaaggctgggcctgaacagggtgcccccaaggctaagctgtag

SEQ ID NO: 1165 - protein, 502 aa, Gibberella zeae
  Gibberella zeae PH-1
MVLKGGEVAEHNSADSCWVIVHGKAYDVTEFLPEHPGGKKIILKYAGKDATEAYEPIHPPDTLDKFLEASKHLGPVDMNTVQQETKEVDPEEEERLQRMEQKPLLSQCYNLFDFEAVARRVMSKVAWGYYSSAADDEITMRENHSAFHRIWFRPQILVDVENIDFSTTMLGTKTDIPVYVTATALGKLGNPEGEVVLTRAAAKHNVIQMIPTLASCSFDEIVDAKAGDQVQWLQLYVNKDRAITKKIVQHAEKRGCKGLFITVDAPQLGRREKDMRSKFTDPGSHVQEGTDTDNSQGAARAISTFIDPALSWKDIAWFQSITSMPIILKGVQRVEDVLKAIDYGCQGVVLSNHGGRQLEFARSAIEVLAETMPILRERGLENKIEIFIDGGIRRGTDILKALCLGARGVGIGRPFLYAMSTYGEAGVIRAMQLLKDELEMNMRLIGASKIEDLHPGMLDLRSLFQHGAVPSDNLSSTVYDPLAVPAQRPKAGPEQGAPKAKL

SEQ ID NO: 1166 - DNA, 1782 bp, Candida glabrata
  Candida glabrata CBS 138
  CDS (1)..(1782)
atgcaaaggtacatatttaagacaccacattccagggtgctacgatctttaccaagacatgccatcaattccacaacaaaaagaggtattgtctcgacgaggagctctttaaataaccaattcttcaactccgagagacaaaggaagagttataaatggttctggagtatcgggttgacagtcggtctgacagcagcaattgctgataatctccacaacaaaaaagatatttataatgatgccaaatttgacagttcaaaacccaaaatttcacccagtgaagttataaaacataatacaccggaggactgctgggtagtcatagatggctacgtttacgatttaaccaattttattgctttgcacccaggtggtccggatattataaaaacgaatgctgggaaagatgtaactgcaatctttgatccaatccatccgccagatgccatagaaaagtacataaaacccgaacagcatattggtcccctagatggtaaattggatgcagagtacatatgtccaccttatgcgccaggtgaaaccccagatgatattgcaagaaaagctgctttgagagctagattaccacctttgagctcaattatgaacctatatgattttgaatacttagcatcacaaatcctgtctaaacaggcatgggcatattactcttctgctagtgatgatgaggtcagttaccgtgagaaccacaatgcataccacagaatttttttcaatccaaaggttcttgttgatgtcagtaaagtcgatacctctacagaaatgctaggccataaagttgatgttccattctatgttaccgcaacagcattgtgtaaactaggtaatccaaaagaaggtgaaaaagacatcgctagaggatgtggtcaaggaccaaacaagactccacaaatgatttcaacgttagcttcctgttctgttgatgagattgtaaatgctgcaccatcaaaagaccaagtcatatggtaccaactatatgttaactctgatcgtaagataactgaaaacttgataaagcatgtcgaagacttaggcgttaaagctatatttgttacagttgatgccccaagtttaggttctagagagaaggacaaaaaggttaagttcaacaatactatgagtggaccaaagagcatgaagaaatctgatgtaggggaatcagaaggtgccgctcaaaccttgtctaaatttatcgatccttctttgtcctggcaagacatcaaaatactaagaaagaaaactaaattgcccatagttatcaaaggtgtgcaaagagttcaggatgtcgttaaagctgcagaaataggctgtaatggtgttgttctatcgaatcatggtggtagacagttggattttgctagggctccgattgaagttcttgctgaaactatgcctgtcttgaaggagaagaaactggacaagaactttgaagtatttgtagatggtggtgttcgccgtggtactgatgtgataaaagcactatgtcttggggcatctggtgttggtctgggtagaccatttttgtatgccaactcctgttatggaaaggatggtgtgcaaaaggcgattgatctattgaaaacagagattgaaatgaacatgagattgctgggtgttacatccattaaggacatgaatcctgaactattagatctttcttcattgcatggtaggactgtcaatgtaccaaaggattcgttgtatgttaatgtttacaacaagcctgagctagctgagttcttagacgatgccagcgattga

SEQ ID NO: 1167 - protein, 593 aa, Candida glabrata
  Candida glabrata CBS 138
MQRYIFKTPHSRVLRSLPRHAINSTTKRGIVSTRSSLNNQFFNSERQRKSYKWFWSIGLTVGLTAAIADNLHNKKDIYNDAKFDSSKPKISPSEVIKHNTPEDCWVVIDGYVYDLTNFIALHPGGPDIIKTNAGKDVTAIFDPIHPPDAIEKYIKPEQHIGPLDGKLDAEYICPPYAPGETPDDIARKAALRARLPPLSSIMNLYDFEYLASQILSKQAWAYYSSASDDEVSYRENHNAYHRIFFNPKVLVDVSKVDTSTEMLGHKVDVPFYVTATALCKLGNPKEGEKDIARGCGQGPNKTPQMISTLASCSVDEIVNAAPSKDQVIWYQLYVNSDRKITENLIKHVEDLGVKAIFVTVDAPSLGSREKDKKVKFNNTMSGPKSMKKSDVGESEGAAQTLSKFIDPSLSWQDIKILRKKTKLPIVIKGVQRVQDVVKAAEIGCNGVVLSNHGGRQLDFARAPIEVLAETMPVLKEKKLDKNFEVFVDGGVRRGTDVIKALCLGASGVGLGRPFLYANSCYGKDGVQKAIDLLKTEIEMNMRLLGVTSIKDMNPELLDLSSLHGRTVNVPKDSLYVNVYNKPELAEFLDDASD

SEQ ID NO: 1168 - DNA, 1770 bp, Kluyveromyces lactis
  Kluyveromyces lactis NRRL Y-1140
  CDS (1)..(1770)
atgagatcagccgtaagagtttttggtaagaaccgtgttagtgggttgagatttgctagcaccagtagtaaatctccaattcataagtctagtgctactctgcgttttgggagatcagctaagtctggctatagtgcgttttcgttcggtaagaaagtcatcactggtggtgcctttcttgttgccggttcggttggtattgcattgatttctcaattcaatgatagcgttgaaaatggtgccaaggtcgatatgacgaaaccaaaggtttctccaacagaagtcgcaaagcactcttctcccaaagactgttgggtggtcattgagggttacgtatacaatttgactgatttcatcagcgcccatcctggtggtccagctatcattgagaacaacgcaggaaaagatgtgaccaagatctttgctccaattcatgctccagatgtcatcgaaaaatacattgctccagagaacagaattggtccactagatggtacaatgcctgatgacttggtctgtgctgcattgaccccaggtgaaactcccgaagatgtggcaagaaaggaacaattgcgtcaatctttacccgatattgattccttggttaacatctatgatttcgaattcttggcatcccaaatcttgactaagcaagcttggtcttactactcttctgccgctgatgatgaagttacacatagagaaaaccacgctgcataccatcgtatattcttcaagccaagaatcttggttaacgttaaggaagttgacacttccactacaatgttaggtgaaaaagtcggtgttccattttatgtgtctgccaccgcattgtgtaaactaggtaaccccaaggaaggtgaaaaggacatcgcaagaggttgcggtgaaagtgacgtgaaacctgttcaaatgatttccactttggcttcttgttctttacaagaaatcgtggaagcagccccatctaaggaacaaatccaatggttccaattgtatgtgaacagtgaccgtaagatcactgaagatctaatcaagaacgttgaaaaattaggattaaaggccattttcgttacagtagatgctccttccttaggtaacagagaaaaagatgctaaagtcaaatttacaaactcaaacggtgccaaggctatggaaaaaagtaaggttaaggaatctaagggtgcttctagagctctctcgtcattcattgatcctgcattaaactgggatgatatcatcgaatttaagaaaaagaccaaattgccaatcgtcatcaagggtgttcaatgtgttgaagatgtcttgaaagctgctgaaatcggtgttgcaggtgtcgttctatctaaccacggtggtagacaattggatttctctagggctcctatcgaagtgttggctgagactatgccagtgctaagagaaaagaaattggatgataaaatcgaaattttcattgatggtggtgttagaagaggtaccgatatcctaaaggcattgtgtcttggtgccaagggtgtcggtctaggtagaccattcttatactctaacagttgctacggtaaagaaggtgtcaagaaagccattgagctattaaaggacgaattggaaatgtcgatgagattactcggtgtcacaagtatagaccaattatccgaaaaatacctagatctatctacaatccatggtagaactgtcaatgttcctcgcgataacctataccgtgaggtatatgtcccacatgaaccaactcaattcttagaggaatga

SEQ ID NO: 1169 - protein, 589 aa, Kluyveromyces lactis
  Kluyveromyces lactis NRRL Y-1140
MRSAVRVFGKNRVSGLRFASTSSKSPIHKSSATLRFGRSAKSGYSAFSFGKKVITGGAFLVAGSVGIALISQFNDSVENGAKVDMTKPKVSPTEVAKHSSPKDCWVVIEGYVYNLTDFISAHPGGPAIIENNAGKDVTKIFAPIHAPDVIEKYIAPENRIGPLDGTMPDDLVCAALTPGETPEDVARKEQLRQSLPDIDSLVNIYDFEFLASQILTKQAWSYYSSAADDEVTHRENHAAYHRIFFKPRILVNVKEVDTSTTMLGEKVGVPFYVSATALCKLGNPKEGEKDIARGCGESDVKPVQMISTLASCSLQEIVEAAPSKEQIQWFQLYVNSDRKITEDLIKNVEKLGLKAIFVTVDAPSLGNREKDAKVKFTNSNGAKAMEKSKVKESKGASRALSSFIDPALNWDDIIEFKKKTKLPIVIKGVQCVEDVLKAAEIGVAGVVLSNHGGRQLDFSRAPIEVLAETMPVLREKKLDDKIEIFIDGGVRRGTDILKALCLGAKGVGLGRPFLYSNSCYGKEGVKKAIELLKDELEMSMRLLGVTSIDQLSEKYLDLSTIHGRTVNVPRDNLYREVYVPHEPTQFLEE

SEQ ID NO: 1170 - DNA, 1677 bp, Debaryomyces hansenii
  Debaryomyces hansenii CBS767
  CDS (1)..(1677)
atgattggattccgttctactctccttaagcacaaacccattggtagacttagttatagactgagacttcgtttcagcactagagcgttgaaatcaccgtttaatggggaacggaaaataaagtccggggtatgggtacctagcatcattttattaggtacgattacagccttcatttccaaggatgataacattgcattggattcgaaacagacacagggtgtcacagttgaagaattgaggaagcataattcggcttctgagggtatttgggtcgcacttaatggccaagtttacgatttgactgatttcttggtacaacacccaggaggtgctgatattatcacgcactatgcgggttgtgatgctagtcttattttcaataagttccatgctaaggatgtgtttagcaaatatttatcgccagaaaattatcttggtccattaataggagaaatggagaaagcagccgatattaccgaagataacgacgaagataggcttgagagaatagaaaacaaacctcctttggctgcgatgttcaatttatccgattttgaatatgtagctaaggcaatacttccaaaaagtgcttggtcgtattactcgggaggttctgatgatgaggtaactatgagggaaaataataatgcattccttaggattttttttaatccaaaagtcttaattgatactgctgatattgatatgtcgactgagatgttaggcacgaagacagacgctcctttttattgttctgctgctgctgctgcaaaacttggtcaccctgatggtgaattatcgatcgccgatggatgcggatcggagaatattatccagatgatttcaagtgctgcatcctattctttcgatgagattagtgactttgcaaaaaaaagcacttcccaatggtttcagttatatgtgcataaggacaggactctgagttacgagatgattgacgcttgtgagaaaaagggaattaaggctatatttgtgactgttgacactcccttgtttggacgtagagaaaaggacttgaggtttaaagtaggacagacagatgatgacgagagtgacgaaacttccggtggcggtgacgattttattctttcgtatagagatgctgggttatgttgggatgatattgacaaattcaagaaagcaactaacttgcctatcgttatcaaaggtgtccagagagtggaggatgtgttacttgcgatagaacataaagtagacggagtggtattgtccaaccatggtggtagacaacttgattttgcaagagctccaattgaggttttggctgacgttatgccagttttaagagaaaagaagttagaaaacgaaattgaaatttatgtcgacggggggattagaagaggaagtgatgtaattaaggctttatgtttaggtgcaaagggtgttggactcggaagatcgtttttgtacgcaaatagtgcctatgggaagaagggagtagtcaaagcctgtgaattgttgaaggacgaaatagctagagacatgaaattacttggggtttccaaacttgaagatttaaagcccgaattattggatttgagaagcttatattctagaccaatataccaatctgttgtgggttcaaactatgaaccattgtaccttccaaagtttaaaaatgaagatgattaa

SEQ ID NO: 1171 - protein, 558 aa, Debaryomyces hansenii
  Debaryomyces hansenii CBS767
MIGFRSTLLKHKPIGRLSYRLRLRFSTRALKSPFNGERKIKSGVWVPSIILLGTITAFISKDDNIALDSKQTQGVTVEELRKHNSASEGIWVALNGQVYDLTDFLVQHPGGADIITHYAGCDASLIFNKFHAKDVFSKYLSPENYLGPLIGEMEKAADITEDNDEDRLERIENKPPLAAMFNLSDFEYVAKAILPKSAWSYYSGGSDDEVTMRENNNAFLRIFFNPKVLIDTADIDMSTEMLGTKTDAPFYCSAAAAAKLGHPDGELSIADGCGSENIIQMISSAASYSFDEISDFAKKSTSQWFQLYVHKDRTLSYEMIDACEKKGIKAIFVTVDTPLFGRREKDLRFKVGQTDDDESDETSGGGDDFILSYRDAGLCWDDIDKFKKATNLPIVIKGVQRVEDVLLAIEHKVDGVVLSNHGGRQLDFARAPIEVLADVMPVLREKKLENEIEIYVDGGIRRGSDVIKALCLGAKGVGLGRSFLYANSAYGKKGVVKACELLKDEIARDMKLLGVSKLEDLKPELLDLRSLYSRPIYQSVVGSNYEPLYLPKFKNEDD

SEQ ID NO: 1172 - DNA, 1482 bp, Yarrowia lipolytica
  Yarrowia lipolytica CLIB122
  CDS (1)..(1482)
atggtttccgtcgaagaagtcgctaaacacaactccaaggactcttgctgggtcattttgcatggaaaggcctatgatctgaccgagttcctgcctgagcatcctggaggacaggctatcattctcaagtacgctggaaaggacgccaccaaggcttttgacccaatccaccctcgtgatgtggtcgataagttcttggataaggacaagcacctgggagaggtgactggagagattgccgccgaagaagaagaggaagtcactccagaggaaaaggcgcgtcttgagcggtacgagaaccgtcctcccctcagccagatcttcaactcgttcgattttgagtacgtggctagacacaccatgtctcccaacgcatgggcgtactactcttctggatccgatgacgagatcactgtcagagaaaaccacagagccttccacaaaatctggttccgaccacgagtgctggtagatgtcaaaaacgtggacatttccaccaccatgctgggcacaaagtcatccgtaccgttttacatcaccgctacagctctaggtaaattgggccatcccgagggagaagtggtgctcacacgtggagccgacaagatggatgtcattcagatgatccccactctggcctcgtgctcgttcgacgagattgtggacgccgccacagacaaacagactcagtggatgcagctgtacgtgaacatggatcgagaggtgaccaaaaagattgtgcagcacgccgaaaagcggggagtcaagggtctgttcatcactgtggacgctcctcagcttggacgacgagaaaaggacatgcgaaccaaattcggagatcctggagctcaagttcagcagtccgacgactctgtggaccgatctcagggagctgctcgagccatttcctcgttcatcgacccctctctgtcgtggaaggacatcccctggttccagagcatcaccaagatgcccatcattctcaagggtgttcagtgtgctgaagatgcgctcaaggctgtggaatacaaggtggacggtatcctgctgtctaaccatggaggtcgacagctggagtttgcccggccctcaatcgaggtgctggtcgaagtcatggctgctctgagggcaaagggatggcaggattacatcgaggtgtacattgacggaggtataagacgagccactgacgttatcaaggctctgtgtctgggtgccaaaggagtgggtattggacggcctttcctgtatgctatgagcacatatggagaggatggcgtgtgccatctgatccagctgctcaaggatgagatggaaatgaacatgcgtctgattggagccaccaagattgaggatctcaaccccagcatggttgacctcaagagcatcttcacccactcggcagacaccgctcgggacattctgggagagaatgtttaccaacatatggagatgcctcttttcaagggcagcaagctgtag

SEQ ID NO: 1173 - protein, 493 aa, Yarrowia lipolytica
  Yarrowia lipolytica CLIB122
MVSVEEVAKHNSKDSCWVILHGKAYDLTEFLPEHPGGQAIILKYAGKDATKAFDPIHPRDVVDKFLDKDKHLGEVTGEIAAEEEEEVTPEEKARLERYENRPPLSQIFNSFDFEYVARHTMSPNAWAYYSSGSDDEITVRENHRAFHKIWFRPRVLVDVKNVDISTTMLGTKSSVPFYITATALGKLGHPEGEVVLTRGADKMDVIQMIPTLASCSFDEIVDAATDKQTQWMQLYVNMDREVTKKIVQHAEKRGVKGLFITVDAPQLGRREKDMRTKFGDPGAQVQQSDDSVDRSQGAARAISSFIDPSLSWKDIPWFQSITKMPIILKGVQCAEDALKAVEYKVDGILLSNHGGRQLEFARPSIEVLVEVMAALRAKGWQDYIEVYIDGGIRRATDVIKALCLGAKGVGIGRPFLYAMSTYGEDGVCHLIQLLKDEMEMNMRLIGATKIEDLNPSMVDLKSIFTHSADTARDILGENVYQHMEMPLFKGSKL

SEQ ID NO: 1174 - DNA, 1482 bp, Aspergillus nidulans
  Aspergillus nidulans FGSC A4
  CDS (1)..(1482)
atgacgaataacaagttaacgggcgctgatgtcgccaagcacaactccaaggactcttgctgggtcattgtacacggaaaagcctatgacgtgaccgagtttttgccagaacaccctggtggccagaagatcattctcaagtacgccggcaaagatgcgaccgaagaattcgaccccatccaccccccagataccctcgacaagtacctcgactcctcaaaacacctgggcgaagtcgatatggcgaccgttgagcaggaggagaaggctcatgaccccgaagaagatgctcgccaagagcgcatcgagcgcatgccccctctctcggcatgctacaatctgctagatttcgagactgttgcgcggagcgtgatgaagaagactgcttgggcttattattctagcggtgcggatgatgaaattactatgcgcgagaaccaccaagccttccagaagatctggttccggccccgagttctagttgatgtcgagaacgtggacttctcgaccaagatgctgggcaccaagtgctcgatcccgttctatgtcacggcaactgctcttggaaagctaggtaatcctgagggcgaagttgttctgactcgcgcggcacacgaccatgatgtcattcagatgatccccacccttgcctcgtgctctttcgacgagattgtcgacgcgcgccgaggcgatcaggtgcaatggctgcagctgtacgtgaacaaagaccgcgccatcaccaagcggatcatcgagcacgccgaggcccgcggctgcaagggactcttcatcaccgttgacgcccctcaacttggccgccgtgaaaaggacatgcgatccaagttctcggatgttggctccaatgttcaggcaaccggaggcgatgaagtcgaccgctcccagggtgccgcccgcgccatctcatcattcatcgatccctcgctatcgtggaaggacattccttggttccagtctgtcaccaagatgcccattgtcctcaaaggcgtccagtgtgttgaagatgtcctccgcgccgtcgaggccggagtccagggtgtcgttctctccaaccacggtggtcgccaactcgacactgccccatcgggcattgaagtcctcgcccaggtcatgccgatcttgcgcgagcgcggctgggagaaccgcatcgagatcttcattgacggcggtatccgccgtgcaactgatattctcaaagctctctgcctaggcgccaagggcgttggtatcggccgtcctttcctgtttgccatgtctgcatacggccagcctggtgtcaaccgagccatgcagctcctgaaagacgaactcgagatgaacatgcgcttgatcggtgcccagaagatcgcagacctcaaccctagtatggttgacgtgcgcggtctggttggtggtcacatccctctcatgttcaattggctatcctctgcccctgattttaacaatgcctatatcaatgcttaa

SEQ ID NO: 1175 - protein, 493 aa, Aspergillus nidulans
  Aspergillus nidulans FGSC A4
MTNNKLTGADVAKHNSKDSCWVIVHGKAYDVTEFLPEHPGGQKIILKYAGKDATEEFDPIHPPDTLDKYLDSSKHLGEVDMATVEQEEKAHDPEEDARQERIERMPPLSACYNLLDFETVARSVMKKTAWAYYSSGADDEITMRENHQAFQKIWFRPRVLVDVENVDFSTKMLGTKCSIPFYVTATALGKLGNPEGEVVLTRAAHDHDVIQMIPTLASCSFDEIVDARRGDQVQWLQLYVNKDRAITKRIIEHAEARGCKGLFITVDAPQLGRREKDMRSKFSDVGSNVQATGGDEVDRSQGAARAISSFIDPSLSWKDIPWFQSVTKMPIVLKGVQCVEDVLRAVEAGVQGVVLSNHGGRQLDTAPSGIEVLAQVMPILRERGWENRIEIFIDGGIRRATDILKALCLGAKGVGIGRPFLFAMSAYGQPGVNRAMQLLKDELEMNMRLIGAQKIADLNPSMVDVRGLVGGHIPLMFNWLSSAPDFNNAYINA

SEQ ID NO: 1176 - DNA, 1683 bp, Candida albicans
  Candida albicans SC5314
  CDS (1)..(1683): transl_table=12
atggtactttcattacaagaagtttctcaacataataagaaagatgattgttgggtaattattcatgataaagcatatgatctttctgatttcatggatgaacatcctggtggactggcaattattatgaaatatgctggtaaagatgctactaaagcttttgatcctattcatcctggtgatactttaactaaatatttacaaccaaaatatcataaaggagaagttgaaaagaaacagaaaaagaagaagagtgccactacaaataatggcaccacaactaaacctactgaatccactctggtctcacaagaaacagttgatgaatttgatgttgaatatgatgaacaagaaaacaaagctgctatcactacagaagttcaaactaatggagctggtaataacaacgacgatgaagttgaaggtgatgatgagtatgacgacgacgatgatgatgatgagccaccaactgaagaagaacttaaacgtcgtcaacttgttaaaaacaaaccagatatttctcaaatttataacttgtatgattttgaatttgttgctcgtcatactatggatccaattggttgggcatattatctgtcactggcagatggtgaagctacattcagattaaatactggaagttatcaaagaattttttttaaaccaagagtaatgattgatgttactgaaattgatacatcaacgacaatgttgggaactaaagtttcagttccattttatattactgctacggcattaggtaaattaggccatcctgatggtgaaaaagttttaacccgaggagctcaaaaacatgatcttattcaaatgatccctacgttggcttcatgttcatttgatgaaattgttgatgaagctaaaccaaatcaaactcaatggtttcaactttatgtcaattcagatcgtgaaattacgaaaaagattgttcaacatgctgaagctagaggtatgaaaggattatttattacggttgatgctccacaattgggcagaagagaaaaagatatgaaaactaaaagcattgttgatttaagttttgttcaaggtgaagatgatgaagctgatcgttcacaaggttcagcaagagccatttcttcgtttattgatactagtttaagttggaaagatttgaaatggtttaaatcaattactaaaatgccaataattttaaagggagttcaaagagttgaagatgccattatagcagctgaacatggatgtgctggtgtggttttaagtaatcacgggggtagacaattggaattttctccaccaccaattgaagttttagcagaattgatgccaattttgagagaaaaagggttagcagataattttgaagtttatatagatggaggtgttagaagagctactgatattttaaaagctgtttgtttaggagcaaaaggtgttggtattggtcgtccatttttatatgccatgtcaggatatggagatgctggtgtcaataaagctatacaattacttaaagatgaaatgattatgaatatgagattattgggagttaataaacttgaagaattgaatgaattatttgttgatactaaatatatgcaaacaagatatgttcctgatgatgtgttgtttaacagagtttatgaaccggtaccattaccaagattcaaagatacaaaattgtag

SEQ ID NO: 1177 - protein, 560 aa, Candida albicans
  Candida albicans SC5314
MVLSLQEVSQHNKKDDCWVIIHDKAYDLSDFMDEHPGGSAIIMKYAGKDATKAFDPIHPGDTLTKYLQPKYHKGEVEKKQKKKKSATTNNGTTTKPTESTSVSQETVDEFDVEYDEQENKAAITTEVQTNGAGNNNDDEVEGDDEYDDDDDDDEPPTEEELKRRQLVKNKPDISQIYNLYDFEFVARHTMDPIGWAYYSSSADGEATFRLNTGSYQRIFFKPRVMIDVTEIDTSTTMLGTKVSVPFYITATALGKLGHPDGEKVLTRGAQKHDLIQMIPTLASCSFDEIVDEAKPNQTQWFQLYVNSDREITKKIVQHAEARGMKGLFITVDAPQLGRREKDMKTKSIVDLSFVQGEDDEADRSQGSARAISSFIDTSLSWKDLKWFKSITKMPIILKGVQRVEDAIIAAEHGCAGVVLSNHGGRQLEFSPPPIEVLAELMPILREKGLADNFEVYIDGGVRRATDILKAVCLGAKGVGIGRPFLYAMSGYGDAGVNKAIQLLKDEMIMNMRLLGVNKLEELNELFVDTKYMQTRYVPDDVLFNRVYEPVPLPRFKDTKL

SEQ ID NO: 1178 - DNA, 1554 bp, Aspergillus oryzae
  CDS (1)..(1554)
atgagcaaaggcaagctcaccggcgctgatgttgccgaacacaactcccgcgactcttgctgggtcattatccatggaaaggcgtacgatataaccgaattcttaccaggtatagtatatcgcggtccattcaggctgagtcttctaacggtggcaacagagcatcccggtggccagaagatcatcctgaagtacgcaggcaaggatgcgaccgaggaattcgaccctattcaccctccggacactctggaaaaatacctcgatccctctaagcaccttggagaggttgacatgagcaccgtcgaacaagaagagaaggttgcagaccccgaagaaaccgagcggcaagagcggatcaagcggatgcccccgttgcaagcatgctacaacctgatggacttcgaggcagtcgcacgggatgtgatgaagaagaccgcctgggcatactactctagcggtgctgatgatgaaattactatgcgtgaaaaccactctgccttccacaagatctggttccgtcctcaaatcctcgttgatgtggagaatgttgacttctccacaacaatgctcggagcgaagacatcgattcccttctacgtaaccgccactgcccttggaaagctgggtaaccctgagggtgaagtggtgctcacacgcgctgcccacgatcacgatgtcatccagatgatcccgacactagcttcttgctcctttgacgagattgtcgatgccaagaagggtgaccaggtccaatggctgcagctttacgtgaacaaggaccgcgcaatcaccaagcgcattgttcaacatgccgaagcccgcggctgcaagggtctatttatcaccgtagatgcccctcaactcggccgtcgtgagaaggacatgcgttccaagttctccgacgagggctccaacgtccaagccagcggaggcgatgccgttgaccgctcccagggtgctgccagagccatctcgtcgttcatcgacccctctctttcctggaaggacatcccctggttccagtccatcaccaagatgcccatcgtcctgaagggtgtccagcgcgtcgaagacgtcctccgtgccgccgaaatgggcctggacggtgtcgtcctctccaaccacggcggtcgccagctggacaccgcgccctctggcatcgaagtcctcgcagaggtcatgcccatcctccgcgagcgcggctgggagaacaagatcgagatcttcatcgacggtggtgtccgtcgttccacggatattctgaaggccctgtgcctgggcgcccggggtgtaggtatcggccggccattcctgtacgccatgtccacgtacggccaggccggtgtggaccgcgcgatgcagcttctcaaggacgagatggagatgaacatgcgtttaattggagccaccaagatttcagatctcaaccccagcctgatcgatgtgcgtggcctgaccagcggccaccatgcttctgttccctcggacaccttgaccctccgtgcctatgatcctctccaggcaccccggtttagcgagaaggctaagctatag

SEQ ID NO: 1179 - protein, 517 aa, Aspergillus oryzae
MSKGKLTGADVAEHNSRDSCWVIIHGKAYDITEFLPGIVYRGPFRLSLLTVATEHPGGQKIILKYAGKDATEEFDPIHPPDTLEKYLDPSKHLGEVDMSTVEQEEKVADPEETERQERIKRMPPLQACYNLMDFEAVARDVMKKTAWAYYSSGADDEITMRENHSAFHKIWFRPQILVDVENVDFSTTMLGAKTSIPFYVTATALGKLGNPEGEVVLTRAAHDHDVIQMIPTLASCSFDEIVDAKKGDQVQWLQLYVNKDRAITKRIVQHAEARGCKGLFITVDAPQLGRREKDMRSKFSDEGSNVQASGGDAVDRSQGAARAISSFIDPSLSWKDIPWFQSITKMPIVLKGVQRVEDVLRAAEMGLDGVVLSNHGGRQLDTAPSGIEVLAEVMPILRERGWENKIEIFIDGGVRRSTDILKALCLGARGVGIGRPFLYAMSTYGQAGVDRAMQLLKDEMEMNMRLIGATKISDLNPSLIDVRGLTSGHHASVPSDTLTLRAYDPLQAPRFSEKAKL

SEQ ID NO: 1180 - DNA, 1758 bp, Kluyveromyces lactis
  CDS (1)..(1758)
atgagatcagccgtaagagtttttggtaagaaccgtgttagtgggttgagatttgctagcaccagtagtaaatctccaattcataagtctagtgctactctgcgttttgggagatcagctaagtctggctatagtgcgttttcgttcggtaagaaagtcatcactggtggtgcctttcttgttgccggttcggttggtattgcattgatttctcaattcaatgatagcgttgaaaatggtgccaaggtcgatatgacgaaaccaaaggtttctccaacagaagtcgcaaagcactcttctcccaaagactgttgggtggtcattgagggttacgtatacaatttgactgatttcatcagcgcccatcctggtggtccagctatcattgagaacgcaggaaaagatgtgaccaagatctttgctccaattcatgctccagatgtcatcgaaaaatacattcgtccagagaacagaattggtccactagatggtacaatgcctgatgacttggtctgtgctgcattgaccccaggtgaaactcccgaagatatggcaagaaaggaacaattgcgtcaatctttacccgatattgattccttggttaacatctatgatttcgaattcttggcatcccaaatcttgactaagcaagcttggtcttactactcttctgccgctgatgatgaagttacacatagagaaaaccacgctgcataccatcgtatattcttcaagccaagaatcttggttaacgttaaggaagttgacacttccactacaatgttaggtgaaaaagtcggtgttccattttatgtgtctgccaccgcattgtgtaaactaggtaaccccaaggaaggtgaaaaggacatcgcaagaggttgcggtgaaagtgacgtgaaacctgttcaaatgatttccactttggcttcttgttctttacaagaaatcgtggaagcagccccatctaaggaacaaatccaatggttccaattgtatgtgaacagtgaccgtaagatcactgaagatctaatcaagaacgttgaaaaattaggattaaaggccattttcgttacagtagatgctccttccttaggtaacagagaaaaagatgctaaagtcaaatttacaaactcaaacggtgccaaggctatggaaaaaagtaaggttaaggaatctaagggtgcttctagagctctctcgtcattcattgatcctgcattaaactgggatgatatcatcgaatttaagaaaaagaccaaattgccaatcgtcatcaagggtgttcaatgtgttgaagatgtcttgaaagctgctgaaatcggtgttgcaggtgtcgttctatctaaccacggtggtagacaattggatttctctagggctcctatcgaagtgttggctgagactatgccagtgctaagagaaaagaaattggatgataaaatcgaaattttcattgatggtggtgttagaagaggtaccgatatcctaaaggcattgtgtcttggtgccaagggtgtcggtctaggtagaccattcttatactctaacagttgctacggtaaagaaggtgtcaagaaagccattgagctattaaaggacgaattggaaatgtcgatgagattactcggtgtcacaagtatagaccaattatccgaaaaatacctagatctatctacaatccatggtagaactgtcaatgttcctcgcgataacctataccgtgaggtatatgtcccacatgaaccaactcaattctag

SEQ ID NO: 1181 - protein, 585 aa, Kluyveromyces lactis
MRSAVRVFGKNRVSGLRFASTSSKSPIHKSSATLRFGRSAKSGYSAFSFGKKVITGGAFLVAGSVGIALISQFNDSVENGAKVDMTKPKVSPTEVAKHSSPKDCWVVIEGYVYNLTDFISAHPGGPAIIENAGKDVTKIFAPIHAPDVIEKYIRPENRIGPLDGTMPDDLVCAALTPGETPEDMARKEQLRQSLPDIDSLVNIYDFEFLASQILTKQAWSYYSSAADDEVTHRENHAAYHRIFFKPRILVNVKEVDTSTTMLGEKVGVPFYVSATALCKLGNPKEGEKDIARGCGESDVKPVQMISTLASCSLQEIVEAAPSKEQIQWFQLYVNSDRKITEDLIKNVEKLGLKAIFVTVDAPSLGNREKDAKVKFTNSNGAKAMEKSKVKESKGASRALSSFIDPALNWDDIIEFKKKTKLPIVIKGVQCVEDVLKAAEIGVAGVVLSNHGGRQLDFSRAPIEVLAETMPVLREKKLDDKIEIFIDGGVRRGTDILKALCLGAKGVGLGRPFLYSNSCYGKEGVKKAIELLKDELEMSMRLLGVTSIDQLSEKYLDLSTIHGRTVNVPRDNLYREVYVPHEPTQF

SEQ ID NO: 1182 - DNA, 1722 bp, Hansenula anomala
  CDS (1)..(1722)
atgtttaaaagccaattgagaacagcaactgctagatcaagctttagatctttagctagcaagctaaacccccagagattcaattcttcaaagactccacttctcaatgctacaaggggttcaaatcgttccaaaaattcattaatcgcattagccatctcattatcagctgtttcatcttcttattatctataccaaaaggacaaattcattagtgcagatgttcctcattggaaagatatagaactaacaccagaaattgtttctcagcataacaaaaaagatgatctatgggttgtcttgaacggtcaagtttatgacttaacagatttcttgccaaatcatccaggtggtcaaaaaatcattattagatatgctggcaaagatgctacaaagatctttgtaccaattcatccacctgatactattgaaaaatttatcccacctgaaaagcatcttggtccattagttggtgagtttgaacaggaagaagaagaattgagtgatgaagaaattgatagattggaaagaatcgaaagaaaaccaccattatcccaaatgataaatcttcatgattttgaaactattgctagacaaatcttaccaccacctgcattagcttattactgttccgctgcagacgatgaagtcacactaagagaaaatcataatgcttatcatagaatctttttcaacccaaaaatcttgattgatgttaaagatgttgatatttccactgaattctttggtgaaaagacatcagcaccattttatatatctgccactgcattggcgaaattgggccatccagaaggtgaagtcgctattgcaaaaggtgcaggtcgtgaagatgtcgtccaaatgatttctacattagcttcatgttcatttgatgaaatagccgatgcaagaatcccaggccaacaacaatggtatcaattgtatgttaatgcagatagatcaatcaccgagaaagctgtgagacacgcagaggaaagaggtatgaaaggtttattcataacagttgatgcgccatccttaggacgtcgtgaaaaagatatgaagatgaaattcgaagctgatagtgatgtccagggtgatgatgaagatattgatagaagtcaaggtgcttctcgtgctcttagctccttcattgatccttctttatcttggaaagatatcgcttttattaaatccattacaaagatgcctattgttattaaaggtgttcaaagaaaagaagatgtgttacttgctgctgaacatggattacaaggtgttgtcttatcaaaccatggtggtcgtcaattagattataccagagccccagtggaagttttagctgaagttatgccaatcttgaaagaaagaggtttagatcaaaagattgacatctttgttgatggtggtgttagaagaggtactgatgtcttgaaagctttgtgtcttggtgctaaaggtgttggtttaggtagacctttcttgtatgcaatgagttcatatggtgataaaggtgttactaaagctattcaattgttaaaagatgaaattgaaatgaatatgagattattaggtgtgaataaaattgaagaattgactcctgaattattggatactagaagtattcataacagagccgttccagttgctaaagattatctatatgaacaaaattatcaaagaatgagcggtgctgaatttagaccaggtatagaggattga

SEQ ID NO: 1183 - protein, 573 aa, Hansenula anomala
MFKSQLRTATARSSFRSLASKLNPQRFNSSKTPLLNATRGSNRSKNSLIALAISLSAVSSSYYLYQKDKFISADVPHWKDIELTPEIVSQHNKKDDLWVVLNGQVYDLTDFLPNHPGGQKIIIRYAGKDATKIFVPIHPPDTIEKFIPPEKHLGPLVGEFEQEEEELSDEEIDRLERIERKPPLSQMINLHDFETIARQILPPPALAYYCSAADDEVTLRENHNAYHRIFFNPKILIDVKDVDISTEFFGEKTSAPFYISATALAKLGHPEGEVAIAKGAGREDVVQMISTLASCSFDEIADARIPGQQQWYQLYVNADRSITEKAVRHAEERGMKGLFITVDAPSLGRREKDMKMKFEADSDVQGDDEDIDRSQGASRALSSFIDPSLSWKDIAFIKSITKMPIVIKGVQRKEDVLLAAEHGLQGVVLSNHGGRQLDYTRAPVEVLAEVMPILKERGLDQKIDIFVDGGVRRGTDVLKALCLGAKGVGLGRPFLYAMSSYGDKGVTKAIQLLKDEIEMNMRLLGVNKIEELTPELLDTRSIHNRAVPVAKDYLYEQNYQRMSGAEFRPGIED

SEQ ID NO: 1184 - DNA, 28 bp, Artificial sequence
  primer
atgctaaaatacaaacctttactaaaaa

SEQ ID NO: 1185 - DNA, 26 bp, Artificial sequence
  primer
tcatgcatcctcaaattctgttaaag

SEQ ID NO: 1186 - protein, 571 aa, Artificial sequence
  consensus sequence
  Variant (2)..(3): Xaa in position 2 to 3 is any amino acid
  Variant (5)..(9): Xaa in position 5 to 9 is any amino acid
  Variant (10)..(10): Xaa in position 10 is any or no amino acid
  Variant (14)..(16): Xaa in position 14 to 16 is any amino acid
  Variant (18)..(19): Xaa in position 18 to 19 is any amino acid
  Variant (22)..(22): Xaa in position 22 is any amino acid
  Variant (24)..(24): Xaa in position 24 is any amino acid
  Variant (26)..(28): Xaa in position 26 to 28 is any amino acid
  Variant (29)..(45): Xaa in position 29 to 45 is any or no amino acid
  Variant (50)..(51): Xaa in position 50 to 51 is any amino acid
  Variant (54)..(55): Xaa in position 54 to 55 is any amino acid
  Variant (56)..(56): Xaa in position 56 is any or no amino acid
  Variant (61)..(61): Xaa in position 61 is any amino acid
  Variant (63)..(64): Xaa in position 63 to 64 is any amino acid
  Variant (66)..(66): Xaa in position 66 is any amino acid
  Variant (70)..(71): Xaa in position 70 to 71 is any amino acid
  Variant (73)..(75): Xaa in position 73 to 75 is any amino acid
  Variant (77)..(84): Xaa in position 77 to 84 is any amino acid
  Variant (86)..(98): Xaa in position 86 to 98 is any amino acid
  Variant (99)..(169): Xaa in position 99 to 169 is any or no amino acid
  Variant (171)..(173): Xaa in position 171 to 173 is any amino acid
  Variant (175)..(181): Xaa in position 175 to 181 is any amino acid
  Variant (182)..(182): Xaa in position 182 is any or no amino acid
  Variant (184)..(189): Xaa in position 184 to 189 is any amino acid
  Variant (191)..(192): Xaa in position 191 to 192 is any amino acid
  Variant (196)..(197): Xaa in position 196 to 197 is any amino acid
  Variant (199)..(205): Xaa in position 199 to 205 is any amino acid
  Variant (208)..(208): Xaa in position 208 is any amino acid
  Variant (213)..(214): Xaa in position 213 to 214 is any amino acid
  Variant (218)..(218): Xaa in position 218 is any amino acid
  Variant (220)..(220): Xaa in position 220 is any amino acid
  Variant (224)..(225): Xaa in position 224 to 225 is any amino acid
  Variant (227)..(229): Xaa in position 227 to 229 is any amino acid
  Variant (231)..(231): Xaa in position 231 is any amino acid
  Variant (233)..(233): Xaa in position 233 is any amino acid
  Variant (235)..(236): Xaa in position 235 to 236 is any amino acid
  Variant (238)..(238): Xaa in position 238 is any amino acid
  Variant (241)..(243): Xaa in position 241 to 243 is any amino acid
  Variant (245)..(245): Xaa in position 245 is any amino acid
  Variant (248)..(248): Xaa in position 248 is any amino acid
  Variant (252)..(252): Xaa in position 252 is any amino acid
  Variant (254)..(256): Xaa in position 254 to 256 is any amino acid
  Variant (260)..(261): Xaa in position 260 to 261 is any amino acid
  Variant (266)..(266): Xaa in position 266 is any amino acid
  Variant (270)..(270): Xaa in position 270 is any amino acid
  Variant (272)..(272): Xaa in position 272 is any amino acid
  Variant (273)..(273): Xaa in position 273 is any or no amino acid
  Variant (276)..(288): Xaa in position 276 to 288 is any amino acid
  Variant (289)..(290): Xaa in position 289 to 290 is any or no amino acid
  Variant (294)..(294): Xaa in position 294 is any amino acid
  Variant (301)..(302): Xaa in position 301 to 302 is any amino acid
  Variant (305)..(306): Xaa in position 305 to 306 is any amino acid
  Variant (308)..(311): Xaa in position 308 to 311 is any amino acid
  Variant (312)..(312): Xaa in position 312 is any or no amino acid
  Variant (314)..(314): Xaa in position 314 is any amino acid
  Variant (317)..(317): Xaa in position 317 is any amino acid
  Variant (323)..(323): Xaa in position 323 is any amino acid
  Variant (326)..(327): Xaa in position 326 to 327 is any amino acid
  Variant (329)..(335): Xaa in position 329 to 335 is any amino acid
  Variant (337)..(338): Xaa in position 337 to 338 is any amino acid
  Variant (340)..(340): Xaa in position 340 is any amino acid
  Variant (342)..(343): Xaa in position 342 to 343 is any amino acid
  Variant (345)..(345): Xaa in position 345 is any amino acid
  Variant (351)..(351): Xaa in position 351 is any amino acid
  Variant (354)..(354): Xaa in position 354 is any amino acid
  Variant (359)..(361): Xaa in position 359 to 361 is any amino acid
  Variant (364)..(374): Xaa in position 364 to 374 is any amino acid
  Variant (375)..(380): Xaa in position 375 to 380 is any or no amino acid
  Variant (382)..(382): Xaa in position 382 is any amino acid
  Variant (385)..(385): Xaa in position 385 is any amino acid
  Variant (388)..(388): Xaa in position 388 is any amino acid
  Variant (390)..(390): Xaa in position 390 is any amino acid
  Variant (395)..(395): Xaa in position 395 is any amino acid
  Variant (397)..(397): Xaa in position 397 is any amino acid
  Variant (399)..(399): Xaa in position 399 is any amino acid
  Variant (401)..(407): Xaa in position 401 to 407 is any amino acid
  Variant (410)..(410): Xaa in position 410 is any amino acid
  Variant (413)..(414): Xaa in position 413 to 414 is any amino acid
  Variant (419)..(420): Xaa in position 419 to 420 is any amino acid
  Variant (423)..(425): Xaa in position 423 to 425 is any amino acid
  Variant (427)..(427): Xaa in position 427 is any amino acid
  Variant (429)..(429): Xaa in position 429 is any amino acid
  Variant (431)..(432): Xaa in position 431 to 432 is any amino acid
  Variant (445)..(450): Xaa in position 445 to 450 is any amino acid
  Variant (457)..(457): Xaa in position 457 is any amino acid
  Variant (460)..(460): Xaa in position 460 is any amino acid
  Variant (462)..(470): Xaa in position 462 to 470 is any amino acid
  Variant (471)..(472): Xaa in position 471 to 472 is any or no amino acid
  Variant (474)..(476): Xaa in position 474 to 476 is any amino acid
  Variant (480)..(480): Xaa in position 480 is any amino acid
  Variant (483)..(483): Xaa in position 483 is any amino acid
  Variant (486)..(487): Xaa in position 486 to 487 is any amino acid
  Variant (495)..(495): Xaa in position 495 is any amino acid
  Variant (499)..(499): Xaa in position 499 is any amino acid
  Variant (507)..(507): Xaa in position 507 is any amino acid
  Variant (509)..(509): Xaa in position 509 is any amino acid
  Variant (512)..(513): Xaa in position 512 to 513 is any amino acid
  Variant (516)..(517): Xaa in position 516 to 517 is any amino acid
  Variant (519)..(520): Xaa in position 519 to 520 is any amino acid
  Variant (526)..(526): Xaa in position 526 is any amino acid
  Variant (529)..(529): Xaa in position 529 is any amino acid
  Variant (533)..(533): Xaa in position 533 is any amino acid
  Variant (535)..(540): Xaa in position 535 to 540 is any amino acid
  Variant (542)..(546): Xaa in position 542 to 546 is any amino acid
  Variant (548)..(557): Xaa in position 548 to 557 is any amino acid
  Variant (558)..(565): Xaa in position 558 to 565 is any or no amino acid
  Variant (567)..(570): Xaa in position 567 to 570 is any amino acid
VXXHXXXXXXCWVXXXGXXYDXTXFXXXXXXXXXXXXXXXXXXXXHPGGXXIIXXXAGKDXTXXFXPIHXXDXXXKXXXXXXXXGXXXXXXXXXXXXXXXXXXXXXXXXXXXXXXXXXXXXXXXXXXXXXXXXXXXXXXXXXXXXXXXXXXXXXXXXXXXXXXXXXXXXEXXXRXXXXXXXXPXXXXXXNXXDFEXXAXXXXXXXAWXYYSSXXDDEXTXRENXXAXXXIXFXPXXLXDVXXXDXSTXMLGXKXXXPFYXXATALXKLGXPXXGEXXXXXXXXXXXXXXXQMIXTLASCSXXEIXXAXXXXXQXQWXQLYVNXDRXXTXXXXXXXEXXGXKXXFXTVDAPXLGXREKDXXXKFXXXXXXXXXXXXXXXXXSXGAXRAXSXFIDPXLXWXDXXXXXXXTKXPIXXKGVQXXEDXXXAXEXGXXGVVLSNHGGRQLXXXXXXIEVLAEXMPXLXXXXXXXXXXXEXXXDGGXRRXTDXXKALCLGAXGVGXGRPFLYAXSXYGXXGVXXAXXLLKDEXEMXMRLXGXXXXXXLXXXXXDXXXXXXXXXXXXXXXXXXLXXXXY

SEQ ID NO: 1187 - protein, 57 aa, Artificial sequence
  protein pattern
  Variant (3)..(3): Xaa in position 3 is Ile or Val
  Variant (6)..(6): Xaa in position 6 is Ala, Gly or Ser
  Variant (9)..(9): Xaa in position 9 is Ile or Val
  Variant (10)..(10): Xaa in position 10 is Ile or Leu
  Variant (13)..(13): Xaa in position 13 is Leu or Val
  Variant (18)..(18): Xaa in position 18 is any amino acid
  Variant (22)..(22): Xaa in position 22 is Ile or Leu
  Variant (28)..(28): Xaa in position 28 is Phe or Tyr
  Variant (29)..(29): Xaa in position 29 is Ala or Ser
  Variant (30)..(30): Xaa in position 30 is any amino acid
  Variant (32)..(32): Xaa in position 32 is Ala, Cys, Gly, Ser or Thr
  Variant (35)..(36): Xaa in position 35 to 36 is any amino acid
  Variant (39)..(39): Xaa in position 39 is any amino acid
  Variant (40)..(40): Xaa in position 40 is His, Lys or Arg
  Variant (41)..(41): Xaa in position 41 is Ala or Leu
  Variant (42)..(42): Xaa in position 42 is Ile or Met
  Variant (43)..(43): Xaa in position 43 is Asp, Glu or Gln
  Variant (44)..(44): Xaa in position 44 is Ile or Leu
  Variant (46)..(46): Xaa in position 46 is Lys or Arg
  Variant (47)..(47): Xaa in position 47 is Asp or Thr
  Variant (49)..(49): Xaa in position 49 is Ile, Leu or Met
  Variant (50)..(50): Xaa in position 50 is any amino acid
  Variant (52)..(52): Xaa in position 52 is Asn or Ser
  Variant (56)..(56): Xaa in position 56 is Ile or Leu
GGXRRXTDXXKAXCLGAXGVGXGRPFLXXXSXYGXXGVXXXXXXLXXEXXMXMRLXG

SEQ ID NO: 1188 - protein, 60 aa, Artificial sequence
  protein pattern
  Variant (3)..(3): Xaa in position 3 is Ala, Gly or Ser
  Variant (7)..(7): Xaa in position 7 is Gly or Ser
  Variant (8)..(8): Xaa in position 8 is Ala or Gly
  Variant (9)..(9): Xaa in position 9 is Ala or Ser
  Variant (10)..(10): Xaa in position 10 is Asp or Asn
  Variant (13)..(13): Xaa in position 13 is Ile or Val
  Variant (14)..(14): Xaa in position 14 is Ser or Thr
  Variant (15)..(15): Xaa in position 15 is any amino acid
  Variant (19)..(20): Xaa in position 19 to 20 is any amino acid
  Variant (22)..(22): Xaa in position 22 is Phe or Tyr
  Variant (23)..(23): Xaa in position 23 is any amino acid
  Variant (24)..(24): Xaa in position 24 is Lys or Arg
  Variant (26)..(26): Xaa in position 26 is Phe or Trp
  Variant (28)..(28): Xaa in position 28 is any amino acid
  Variant (30)..(30): Xaa in position 30 is any amino acid
  Variant (31)..(31): Xaa in position 31 is Ile or Val
  Variant (33)..(33): Xaa in position 33 is any amino acid
  Variant (34)..(34): Xaa in position 34 is Asp or Asn
  Variant (35)..(35): Xaa in position 35 is Thr or Val
  Variant (36)..(37): Xaa in position 36 to 37 is any amino acid
  Variant (38)..(38): Xaa in position 38 is Ile or Val
  Variant (40)..(40): Xaa in position 40 is any amino acid
  Variant (43)..(43): Xaa in position 43 is any amino acid
  Variant (44)..(44): Xaa in position 44 is Leu or Met
  Variant (47)..(47): Xaa in position 47 is any amino acid
  Variant (48)..(48): Xaa in position 48 is His or Lys
  Variant (49)..(49): Xaa in position 49 is Cys, Ser, Thr or Val
  Variant (50)..(50): Xaa in position 50 is Ala, Asp, Gly, Ser or Thr
  Variant (51)..(51): Xaa in position 51 is Ala, Ile, Leu or Val
  Variant (53)..(53): Xaa in position 53 is Phe or Val
  Variant (55)..(55): Xaa in position 55 is any amino acid
  Variant (56)..(56): Xaa in position 56 is Ser or Thr
  Variant (58)..(58): Xaa in position 58 is Ala or Thr
  Variant (60)..(60): Xaa in position 60 is Ala or Leu
AWXYYSXXXXDEXXXRENXXAXXXIXFXPXXLXXXXXXDXSTXXLGXXXXXPXYXXAXAX

SEQ ID NO: 1189 - protein, 59 aa, Artificial sequence
  protein pattern
  Variant (2)..(2): Xaa in position 2 is any amino acid
  Variant (7)..(7): Xaa in position 7 is Ala or Ser
  Variant (9)..(9): Xaa in position 9 is Asn, Ser or Thr
  Variant (11)..(11): Xaa in position 11 is any amino acid
  Variant (13)..(13): Xaa in position 13 is Ile or Leu
  Variant (14)..(15): Xaa in position 14 to 15 is any amino acid
  Variant (16)..(16): Xaa in position 16 is Phe, Ile or Leu
  Variant (17)..(19): Xaa in position 17 to 19 is any amino acid
  Variant (21)..(21): Xaa in position 21 is any amino acid
  Variant (22)..(22): Xaa in position 22 is Leu or Met
  Variant (25)..(25): Xaa in position 25 is Ile or Val
  Variant (26)..(26): Xaa in position 26 is Ile or Leu
  Variant (31)..(32): Xaa in position 31 to 32 is any amino acid
  Variant (33)..(33): Xaa in position 33 is Glu or Gln
  Variant (34)..(34): Xaa in position 34 is Asp or Asn
  Variant (35)..(35): Xaa in position 35 is Ala or Val
  Variant (36)..(36): Xaa in position 36 is Ile, Leu or Val
  Variant (37)..(37): Xaa in position 37 is any amino acid
  Variant (39)..(39): Xaa in position 39 is Ala, Ile or Val
  Variant (40)..(40): Xaa in position 40 is Asp or Glu
  Variant (41)..(43): Xaa in position 41 to 43 is any amino acid
  Variant (44)..(44): Xaa in position 44 is Ala, Asp, Asn, Gln or Ser
  Variant (46)..(46): Xaa in position 46 is Ile or Val
  Variant (47)..(47): Xaa in position 47 is Ile, Leu or Val
  Variant (57)..(57): Xaa in position 57 is Asp or Glu
  Variant (58)..(58): Xaa in position 58 is any amino acid
  Variant (59)..(59): Xaa in position 59 is Ala, Ser or Thr
SXFIDPXLXWXDXXXXXXXTXXPIXXKGVQXXXXXXXAXXXXXXGXXLSNHGGRQLXXX

SEQ ID NO: 1190 - protein, 59 aa, Artificial sequence
  protein pattern
  Variant (2)..(8): Xaa in position 2 to 8 is any amino acid
  Variant (9)..(9): Xaa in position 9 is any or no amino acid
  Variant (11)..(11): Xaa in position 11 is any amino acid
  Variant (13)..(13): Xaa in position 13 is Phe or Trp
  Variant (14)..(14): Xaa in position 14 is any amino acid
  Variant (20)..(20): Xaa in position 20 is any amino acid
  Variant (21)..(21): Xaa in position 21 is Asp or Asn
  Variant (23)..(23): Xaa in position 23 is any amino acid
  Variant (24)..(24): Xaa in position 24 is Ile or Val
  Variant (26)..(26): Xaa in position 26 is Asp, Glu or Lys
  Variant (27)..(27): Xaa in position 27 is any amino acid
  Variant (28)..(28): Xaa in position 28 is Ala, Ile or Leu
  Variant (29)..(29): Xaa in position 29 is Ile or Val
  Variant (30)..(31): Xaa in position 30 to 31 is any amino acid
  Variant (32)..(32): Xaa in position 32 is Ala or Val
  Variant (34)..(35): Xaa in position 34 to 35 is any amino acid
  Variant (37)..(37): Xaa in position 37 is any amino acid
  Variant (39)..(39): Xaa in position 39 is Ala or Gly
  Variant (40)..(40): Xaa in position 40 is Ile or Leu
  Variant (42)..(42): Xaa in position 42 is Ile or Val
  Variant (48)..(48): Xaa in position 48 is Gln or Ser
  Variant (51)..(51): Xaa in position 51 is any or no amino acid
  Variant (56)..(56): Xaa in position 56 is any amino acid
  Variant (57)..(57): Xaa in position 57 is Lys or Arg
  Variant (58)..(58): Xaa in position 58 is any amino acid
IXXXXXXXXQXQXXQLYVNXXRXXTXXXXXXXEXXGXKXXFXTVDAPXLGXREKDXXXK

SEQ ID NO: 1191 - protein, 28 aa, Artificial sequence
  protein pattern
  Variant (2)..(2): Xaa in position 2 is Asp, Asn or Ser
  Variant (3)..(5): Xaa in position 3 to 5 is any amino acid
  Variant (6)..(6): Xaa in position 6 is Asp or Ser
  Variant (7)..(7): Xaa in position 7 is any amino acid
  Variant (10)..(10): Xaa in position 10 is Ile or Val
  Variant (11)..(11): Xaa in position 11 is Ile, Leu or Val
  Variant (12)..(12): Xaa in position 12 is any amino acid
  Variant (13)..(13): Xaa in position 13 is Asp or Gly
  Variant (14)..(14): Xaa in position 14 is any amino acid
  Variant (15)..(15): Xaa in position 15 is Ala or Val
  Variant (17)..(17): Xaa in position 17 is Asp or Asn
  Variant (18)..(18): Xaa in position 18 is Ile, Leu or Val
  Variant (19)..(19): Xaa in position 19 is Ser or Thr
  Variant (20)..(20): Xaa in position 20 is Asp, Glu, Asn or Arg
  Variant (22)..(22): Xaa in position 22 is Ile, Leu or Met
  Variant (23)..(23): Xaa in position 23 is Ala, Asp, Pro or Ser
  Variant (24)..(24): Xaa in position 24 is any amino acid
HXXXXXXWVXXXXXXYXXXXFXXXHPGG

SEQ ID NO: 1192 - protein, 20 aa, Artificial sequence
  protein pattern
  Variant (2)..(2): Xaa in position 2 is any amino acid
  Variant (3)..(3): Xaa in position 3 is Ile or Leu
  Variant (4)..(4): Xaa in position 4 is Asp, Glu or Ser
  Variant (5)..(5): Xaa in position 5 is Ala, Asn, Gln or Ser
  Variant (6)..(7): Xaa in position 6 to 7 is any amino acid
  Variant (9)..(10): Xaa in position 9 to 10 is any amino acid
  Variant (14)..(14): Xaa in position 14 is any amino acid
  Variant (15)..(15): Xaa in position 15 is Ile, Leu or Val
  Variant (17)..(19): Xaa in position 17 to 19 is any amino acid
  Variant (20)..(20): Xaa in position 20 is Leu or Met
PXXXXXXNXXDFEXXAXXXX

SEQ ID NO: 1193 - protein, 20 aa, Artificial sequence
  protein pattern
  Variant (4)..(4): Xaa in position 4 is Ala or Val
  Variant (5)..(5): Xaa in position 5 is Asp, Glu or Gln
  Variant (6)..(6): Xaa in position 6 is any amino acid
  Variant (8)..(8): Xaa in position 8 is Ala or Pro
  Variant (9)..(9): Xaa in position 9 is Ala, Ile or Val
  Variant (11)..(11): Xaa in position 11 is Glu, Lys or Arg
  Variant (12)..(12): Xaa in position 12 is Ala, Glu or Gln
  Variant (13)..(18): Xaa in position 13 to 18 is any amino acid
  Variant (19)..(19): Xaa in position 19 is Phe, Ile or Leu
  Variant (20)..(20): Xaa in position 20 is Asp or Glu
EVLXXXMXXLXXXXXXXXXX

SEQ ID NO: 1194 - DNA, 8585 bp, Artificial Sequence
  vector
agcttggacaatcagtaaattgaacggagaatattattcataaaaatacgatagtaacgggtgatatattcattagaatgaaccgaaaccggcggtaaggatctgagctacacatgctcaggttttttacaacgtgcacaacagaattgaaagcaaatatcatgcgatcataggcgtctcgcatatctcattaaagcagggcatgccggtcgagtcaaatctcggtgacgggcaggaccggacggggcggtaccggcaggctgaagtccagctgccagaaacccacgtcatgccagttcccgtgcttgaagccggccgcccgcagcatgccgcggggggcatatccgagcgcctcgtgcatgcgcacgctcgggtcgttgggcagcccgatgacagcgaccacgctcttgaagccctgtgcctccagggacttcagcaggtgggtgtagagcgtggagcccagtcccgtccgctggtggcggggggagacgtacacggtcgactcggccgtccagtcgtaggcgttgcgtgccttccaggggcccgcgtaggcgatgccggcgacctcgccgtccacctcggcgacgagccagggatagcgctcccgcagacggacgaggtcgtccgtccactcctgcggttcctgcggctcggtacggaagttgaccgtgcttgtctcgatgtagtggttgacgatggtgcagaccgccggcatgtccgcctcggtggcacggcggatgtcggccgggcgtcgttctgggctcatggtagactcgacggatccacgtgtggaagatatgaatttttttgagaaactagataagattaatgaatatcggtgttttggttttttcttgtggccgtctttgtttatattgagatttttcaaatcagtgcgcaagacgtgacgtaagtatccgagtcagtttttatttttctactaatttggtcgaagctttgggcggatcctctagactgcagcaaatttacacattgccactaaacgtctaaacccttgtaatttgtttttgttttactatgtgtgttatgtatttgatttgcgataaatttttatatttggtactaaatttataacaccttttatgctaacgtttgccaacacttagcaatttgcaagttgattaattgattctaaattatttttgtcttctaaatacatatactaatcaactggaaatgtaaatatttgctaatatttctactataggagaattaaagtgagtgaatatggtaccacaaggtttggagatttaattgttgcaatgctgcatggatggcatatacaccaaacattcaataattcttgaggataataatggtaccacacaagatttgaggtgcatgaacgtcacgtggacaaaaggtttagtaatttttcaagacaacaatgttaccacacacaagttttgaggtgcatgcatggatgccctgtggaaagtttaaaaatattttggaaatgatttgcatggaagccatgtgtaaaaccatgacatccacttggaggatgcaataatgaagaaaactacaaatttacatgcaactagttatgcatgtagtctatataatgaggattttgcaatactttcattcatacacactcactaagttttacacgattataatttcttcataccattaattaagaattccagctgaccacccatggcaattcccggggatcagctcgaatttccccgatcgttcaaacatttggcaataaagtttcttaagattgaatcctgttgccggtcttgcgatgattatcatataatttctgttgaattacgttaagcatgtaataattaacatgtaatgcatgacgttatttatgagatgggtttttatgattagagtcccgcaattatacatttaatacgcgatagaaaacaaaatatagcgcgcaaactaggataaattatcgcgcgcggtgtcatctatgttactagatcgggaattggcatgcaagcttggcactggccgtcgttttacaacgtcgtgactgggaaaaccctggcgttacccaacttaatcgccttgcagcacatccccctttcgccagctggcgtaatagcgaagaggcccgcaccgatcgcccttcccaacagttgcgcagcctgaatggcgaatgctagagcagcttgagcttggatcagattgtcgtttcccgccttcagtttaaactatcagtgtttgacaggatatattggcgggtaaacctaagagaaaagagcgtttattagaataatcggatatttaaaagggcgtgaaaaggtttatccgttcgtccatttgtatgtgcatgccaaccacagggttcccctcgggatcaaagtactttgatccaacccctccgctgctatagtgcagtcggcttctgacgttcagtgcagccgtcttctgaaaacgacatgtcgcacaagtcctaagttacgcgacaggctgccgccctgcccttttcctggcgttttcttgtcgcgtgttttagtcgcataaagtagaatacttgcgactagaaccggagacattacgccatgaacaagagcgccgccgctggcctgctgggctatgcccgcgtcagcaccgacgaccaggacttgaccaaccaacgggccgaactgcacgcggccggctgcaccaagctgttttccgagaagatcaccggcaccaggcgcgaccgcccggagctggccaggatgcttgaccacctacgccctggcgacgttgtgacagtgaccaggctagaccgcctggcccgcagcacccgcgacctactggacattgccgagcgcatccaggaggccggcgcgggcctgcgtagcctggcagagccgtgggccgacaccaccacgccggccggccgcatggtgttgaccgtgttcgccggcattgccgagttcgagcgttccctaatcatcgaccgcacccggagcgggcgcgaggccgccaaggcccgaggcgtgaagtttggcccccgccctaccctcaccccggcacagatcgcgcacgcccgcgagctgatcgaccaggaaggccgcaccgtgaaagaggcggctgcactgcttggcgtgcatcgctcgaccctgtaccgcgcacttgagcgcagcgaggaagtgacgcccaccgaggccaggcggcgcggtgccttccgtgaggacgcattgaccgaggccgacgccctggcggccgccgagaatgaacgccaagaggaacaagcatgaaaccgcaccaggacggccaggacgaaccgtttttcattaccgaagagatcgaggcggagatgatcgcggccgggtacgtgttcgagccgcccgcgcacgtctcaaccgtgcggctgcatgaaatcctggccggtttgtctgatgccaagctggcggcctggccggccagcttggccgctgaagaaaccgagcgccgccgtctaaaaaggtgatgtgtatttgagtaaaacagcttgcgtcatgcggtcgctgcgtatatgatgcgatgagtaaataaacaaatacgcaaggggaacgcatgaaggttatcgctgtacttaaccagaaaggcgggtcaggcaagacgaccatcgcaacccatctagcccgcgccctgcaactcgccggggccgatgttctgttagtcgattccgatccccagggcagtgcccgcgattgggcggccgtgcgggaagatcaaccgctaaccgttgtcggcatcgaccgcccgacgattgaccgcgacgtgaaggccatcggccggcgcgacttcgtagtgatcgacggagcgccccaggcggcggacttggctgtgtccgcgatcaaggcagccgacttcgtgctgattccggtgcagccaagcccttacgacatatgggccaccgccgacctggtggagctggttaagcagcgcattgaggtcacggatggaaggctacaagcggcctttgtcgtgtcgcgggcgatcaaaggcacgcgcatcggcggtgaggttgccgaggcgctggccgggtacgagctgcccattcttgagtcccgtatcacgcagcgcgtgagctacccaggcactgccgccgccggcacaaccgttcttgaatcagaacccgagggcgacgctgcccgcgaggtccaggcgctggccgctgaaattaaatcaaaactcatttgagttaatgaggtaaagagaaaatgagcaaaagcacaaacacgctaagtgccggccgtccgagcgcacgcagcagcaaggctgcaacgttggccagcctggcagacacgccagccatgaagcgggtcaactttcagttgccggcggaggatcacaccaagctgaagatgtacgcggtacgccaaggcaagaccattaccgagctgctatctgaatacatcgcgcagctaccagagtaaatgagcaaatgaataaatgagtagatgaattttagcggctaaaggaggcggcatggaaaatcaagaacaaccaggcaccgacgccgtggaatgccccatgtgtggaggaacgggcggttggccaggcgtaagcggctgggttgtctgccggccctgcaatggcactggaacccccaagcccgaggaatcggcgtgacggtcgcaaaccatccggcccggtacaaatcggcgcggcgctgggtgatgacctggtggagaagttgaaggccgcgcaggccgcccagcggcaacgcatcgaggcagaagcacgccccggtgaatcgtggcaagcggccgctgatcgaatccgcaaagaatcccggcaaccgccggcagccggtgcgccgtcgattaggaagccgcccaagggcgacgagcaaccagattttttcgttccgatgctctatgacgtgggcacccgcgatagtcgcagcatcatggacgtggccgttttccgtctgtcgaagcgtgaccgacgagctggcgaggtgatccgctacgagcttccagacgggcacgtagaggtttccgcagggccggccggcatggccagtgtgtgggattacgacctggtactgatggcggtttcccatctaaccgaatccatgaaccgataccgggaagggaagggagacaagcccggccgcgtgttccgtccacacgttgcggacgtactcaagttctgccggcgagccgatggcggaaagcagaaagacgacctggtagaaacctgcattcggttaaacaccacgcacgttgccatgcagcgtacgaagaaggccaagaacggccgcctggtgacggtatccgagggtgaagccttgattagccgctacaagatcgtaaagagcgaaaccgggcggccggagtacatcgagatcgagctagctgattggatgtaccgcgagatcacagaaggcaagaacccggacgtgctgacggttcaccccgattactttttgatcgatcccggcatcggccgttttctctaccgcctggcacgccgcgccgcaggcaaggcagaagccagatggttgttcaagacgatctacgaacgcagtggcagcgccggagagttcaagaagttctgtttcaccgtgcgcaagctgatcgggtcaaatgacctgccggagtacgatttgaaggaggaggcggggcaggctggcccgatcctagtcatgcgctaccgcaacctgatcgagggcgaagcatccgccggttcctaatgtacggagcagatgctagggcaaattgccctagcaggggaaaaaggtcgaaaaggtctctttcctgtggatagcacgtacattgggaacccaaagccgtacattgggaaccggaacccgtacattgggaacccaaagccgtacattgggaaccggtcacacatgtaagtgactgatataaaagagaaaaaaggcgatttttccgcctaaaactctttaaaacttattaaaactcttaaaacccgcctggcctgtgcataactgtctggccagcgcacagccgaagagctgcaaaaagcgcctacccttcggtcgctgcgctccctacgccccgccgcttcgcgtcggcctatcgcggccgctggccgctcaaaaatggctggcctacggccaggcaatctaccagggcgcggacaagccgcgccgtcgccactcgaccgccggcgcccacatcaaggcaccctgcctcgcgcgtttcggtgatgacggtgaaaacctctgacacatgcagctcccggagacggtcacagcttgtctgtaagcggatgccgggagcagacaagcccgtcagggcgcgtcagcgggtgttggcgggtgtcggggcgcagccatgacccagtcacgtagcgatagcggagtgtatactggcttaactatgcggcatcagagcagattgtactgagagtgcaccatatgcggtgtgaaataccgcacagatgcgtaaggagaaaataccgcatcaggcgctcttccgcttcctcgctcactgactcgctgcgctcggtcgttcggctgcggcgagcggtatcagctcactcaaaggcggtaatacggttatccacagaatcaggggataacgcaggaaagaacatgtgagcaaaaggccagcaaaaggccaggaaccgtaaaaaggccgcgttgctggcgtttttccataggctccgcccccctgacgagcatcacaaaaatcgacgctcaagtcagaggtggcgaaacccgacaggactataaagataccaggcgtttccccctggaagctccctcgtgcgctctcctgttccgaccctgccgcttaccggatacctgtccgcctttctcccttcgggaagcgtggcgctttctcatagctcacgctgtaggtatctcagttcggtgtaggtcgttcgctccaagctgggctgtgtgcacgaaccccccgttcagcccgaccgctgcgccttatccggtaactatcgtcttgagtccaacccggtaagacacgacttatcgccactggcagcagccactggtaacaggattagcagagcgaggtatgtaggcggtgctacagagttcttgaagtggtggcctaactacggctacactagaaggacagtatttggtatctgcgctctgctgaagccagttaccttcggaaaaagagttggtagctcttgatccggcaaacaaaccaccgctggtagcggtggtttttttgtttgcaagcagcagattacgcgcagaaaaaaaggatctcaagaagatcctttgatcttttctacggggtctgacgctcagtggaacgaaaactcacgttaagggattttggtcatgcattctaggtactaaaacaattcatccagtaaaatataatattttattttctcccaatcaggcttgatccccagtaagtcaaaaaatagctcgacatactgttcttccccgatatcctccctgatcgaccggacgcagaaggcaatgtcataccacttgtccgccctgccgcttctcccaagatcaataaagccacttactttgccatctttcacaaagatgttgctgtctcccaggtcgccgtgggaaaagacaagttcctcttcgggcttttccgtctttaaaaaatcatacagctcgcgcggatctttaaatggagtgtcttcttcccagttttcgcaatccacatcggccagatcgttattcagtaagtaatccaattcggctaagcggctgtctaagctattcgtatagggacaatccgatatgtcgatggagtgaaagagcctgatgcactccgcatacagctcgataatcttttcagggctttgttcatcttcatactcttccgagcaaaggacgccatcggcctcactcatgagcagattgctccagccatcatgccgttcaaagtgcaggacctttggaacaggcagctttccttccagccatagcatcatgtccttttcccgttccacatcataggtggtccctttataccggctgtccgtcatttttaaatataggttttcattttctcccaccagcttatataccttagcaggagacattccttccgtatcttttacgcagcggtatttttcgatcagttttttcaattccggtgatattctcattttagccatttattatttccttcctcttttctacagtatttaaagataccccaagaagctaattataacaagacgaactccaattcactgttccttgcattctaaaaccttaaataccagaaaacagctttttcaaagttgttttcaaagttggcgtataacatagtatcgacggagccgattttgaaaccgcggtgatcacaggcagcaacgctctgtcatcgttacaatcaacatgctaccctccgcgagatcatccgtgtttcaaacccggcagcttagttgccgttcttccgaatagcatcggtaacatgagcaaagtctgccgccttacaacggctctcccgctgacgccgtcccggactgatgggctgcctgtatcgagtggtgattttgtgccgagctgccggtcggggagctgttggctggctggtggcaggatatattgtggtgtaaacaaattgacgcttagacaacttaataacacattgcggacgtttttaatgtactgaattaacgccgaatta

SEQ ID NO: 1195 - DNA, 8587 bp, Artificial Sequence
  vector
gctttgggcggatcctctagaggacaatcagtaaattgaacggagaatattattcataaaaatacgatagtaacgggtgatatattcattagaatgaaccgaaaccggcggtaaggatctgagctacacatgctcaggttttttacaacgtgcacaacagaattgaaagcaaatatcatgcgatcataggcgtctcgcatatctcattaaagcagggcatgccggtcgagtcaaatctcggtgacgggcaggaccggacggggcggtaccggcaggctgaagtccagctgccagaaacccacgtcatgccagttcccgtgcttgaagccggccgcccgcagcatgccgcggggggcatatccgagcgcctcgtgcatgcgcacgctcgggtcgttgggcagcccgatgacagcgaccacgctcttgaagccctgtgcctccagggacttcagcaggtgggtgtagagcgtggagcccagtcccgtccgctggtggcggggggagacgtacacggtcgactcggccgtccagtcgtaggcgttgcgtgccttccaggggcccgcgtaggcgatgccggcgacctcgccgtccacctcggcgacgagccagggatagcgctcccgcagacggacgaggtcgtccgtccactcctgcggttcctgcggctcggtacggaagttgaccgtgcttgtctcgatgtagtggttgacgatggtgcagaccgccggcatgtccgcctcggtggcacggcggatgtcggccgggcgtcgttctgggctcatggtagactcgacggatccacgtgtggaagatatgaatttttttgagaaactagataagattaatgaatatcggtgttttggttttttcttgtggccgtctttgtttatattgagatttttcaaatcagtgcgcaagacgtgacgtaagtatccgagtcagtttttatttttctactaatttggtcgaatctagactgcagcaaatttacacattgccactaaacgtctaaacccttgtaatttgtttttgttttactatgtgtgttatgtatttgatttgcgataaatttttatatttggtactaaatttataacaccttttatgctaacgtttgccaacacttagcaatttgcaagttgattaattgattctaaattatttttgtcttctaaatacatatactaatcaactggaaatgtaaatatttgctaatatttctactataggagaattaaagtgagtgaatatggtaccacaaggtttggagatttaattgttgcaatgctgcatggatggcatatacaccaaacattcaataattcttgaggataataatggtaccacacaagatttgaggtgcatgaacgtcacgtggacaaaaggtttagtaatttttcaagacaacaatgttaccacacacaagttttgaggtgcatgcatggatgccctgtggaaagtttaaaaatattttggaaatgatttgcatggaagccatgtgtaaaaccatgacatccacttggaggatgcaataatgaagaaaactacaaatttacatgcaactagttatgcatgtagtctatataatgaggattttgcaatactttcattcatacacactcactaagttttacacgattataatttcttcatagccacccgggttgctcttccatggcaatgattaattaacgaagagcaagagctcgaatttccccgatcgttcaaacatttggcaataaagtttcttaagattgaatcctgttgccggtcttgcgatgattatcatataatttctgttgaattacgttaagcatgtaataattaacatgtaatgcatgacgttatttatgagatgggtttttatgattagagtcccgcaattatacatttaatacgcgatagaaaacaaaatatagcgcgcaaactaggataaattatcgcgcgcggtgtcatctatgttactagatcgggaattggcatgcaagcttggcactggccgtcgttttacaacgtcgtgactgggaaaaccctggcgttacccaacttaatcgccttgcagcacatccccctttcgccagctggcgtaatagcgaagaggcccgcaccgatcgcccttcccaacagttgcgcagcctgaatggcgaatgctagagcagcttgagcttggatcagattgtcgtttcccgccttcagtttaaactatcagtgtttgacaggatatattggcgggtaaacctaagagaaaagagcgtttattagaataatcggatatttaaaagggcgtgaaaaggtttatccgttcgtccatttgtatgtgcatgccaaccacagggttcccctcgggatcaaagtactttgatccaacccctccgctgctatagtgcagtcggcttctgacgttcagtgcagccgtcttctgaaaacgacatgtcgcacaagtcctaagttacgcgacaggctgccgccctgcccttttcctggcgttttcttgtcgcgtgttttagtcgcataaagtagaatacttgcgactagaaccggagacattacgccatgaacaagagcgccgccgctggcctgctgggctatgcccgcgtcagcaccgacgaccaggacttgaccaaccaacgggccgaactgcacgcggccggctgcaccaagctgttttccgagaagatcaccggcaccaggcgcgaccgcccggagctggccaggatgcttgaccacctacgccctggcgacgttgtgacagtgaccaggctagaccgcctggcccgcagcacccgcgacctactggacattgccgagcgcatccaggaggccggcgcgggcctgcgtagcctggcagagccgtgggccgacaccaccacgccggccggccgcatggtgttgaccgtgttcgccggcattgccgagttcgagcgttccctaatcatcgaccgcacccggagcgggcgcgaggccgccaaggcccgaggcgtgaagtttggcccccgccctaccctcaccccggcacagatcgcgcacgcccgcgagctgatcgaccaggaaggccgcaccgtgaaagaggcggctgcactgcttggcgtgcatcgctcgaccctgtaccgcgcacttgagcgcagcgaggaagtgacgcccaccgaggccaggcggcgcggtgccttccgtgaggacgcattgaccgaggccgacgccctggcggccgccgagaatgaacgccaagaggaacaagcatgaaaccgcaccaggacggccaggacgaaccgtttttcattaccgaagagatcgaggcggagatgatcgcggccgggtacgtgttcgagccgcccgcgcacgtctcaaccgtgcggctgcatgaaatcctggccggtttgtctgatgccaagctggcggcctggccggccagcttggccgctgaagaaaccgagcgccgccgtctaaaaaggtgatgtgtatttgagtaaaacagcttgcgtcatgcggtcgctgcgtatatgatgcgatgagtaaataaacaaatacgcaaggggaacgcatgaaggttatcgctgtacttaaccagaaaggcgggtcaggcaagacgaccatcgcaacccatctagcccgcgccctgcaactcgccggggccgatgttctgttagtcgattccgatccccagggcagtgcccgcgattgggcggccgtgcgggaagatcaaccgctaaccgttgtcggcatcgaccgcccgacgattgaccgcgacgtgaaggccatcggccggcgcgacttcgtagtgatcgacggagcgccccaggcggcggacttggctgtgtccgcgatcaaggcagccgacttcgtgctgattccggtgcagccaagcccttacgacatatgggccaccgccgacctggtggagctggttaagcagcgcattgaggtcacggatggaaggctacaagcggcctttgtcgtgtcgcgggcgatcaaaggcacgcgcatcggcggtgaggttgccgaggcgctggccgggtacgagctgcccattcttgagtcccgtatcacgcagcgcgtgagctacccaggcactgccgccgccggcacaaccgttcttgaatcagaacccgagggcgacgctgcccgcgaggtccaggcgctggccgctgaaattaaatcaaaactcatttgagttaatgaggtaaagagaaaatgagcaaaagcacaaacacgctaagtgccggccgtccgagcgcacgcagcagcaaggctgcaacgttggccagcctggcagacacgccagccatgaagcgggtcaactttcagttgccggcggaggatcacaccaagctgaagatgtacgcggtacgccaaggcaagaccattaccgagctgctatctgaatacatcgcgcagctaccagagtaaatgagcaaatgaataaatgagtagatgaattttagcggctaaaggaggcggcatggaaaatcaagaacaaccaggcaccgacgccgtggaatgccccatgtgtggaggaacgggcggttggccaggcgtaagcggctgggttgtctgccggccctgcaatggcactggaacccccaagcccgaggaatcggcgtgacggtcgcaaaccatccggcccggtacaaatcggcgcggcgctgggtgatgacctggtggagaagttgaaggccgcgcaggccgcccagcggcaacgcatcgaggcagaagcacgccccggtgaatcgtggcaagcggccgctgatcgaatccgcaaagaatcccggcaaccgccggcagccggtgcgccgtcgattaggaagccgcccaagggcgacgagcaaccagattttttcgttccgatgctctatgacgtgggcacccgcgatagtcgcagcatcatggacgtggccgttttccgtctgtcgaagcgtgaccgacgagctggcgaggtgatccgctacgagcttccagacgggcacgtagaggtttccgcagggccggccggcatggccagtgtgtgggattacgacctggtactgatggcggtttcccatctaaccgaatccatgaaccgataccgggaagggaagggagacaagcccggccgcgtgttccgtccacacgttgcggacgtactcaagttctgccggcgagccgatggcggaaagcagaaagacgacctggtagaaacctgcattcggttaaacaccacgcacgttgccatgcagcgtacgaagaaggccaagaacggccgcctggtgacggtatccgagggtgaagccttgattagccgctacaagatcgtaaagagcgaaaccgggcggccggagtacatcgagatcgagctagctgattggatgtaccgcgagatcacagaaggcaagaacccggacgtgctgacggttcaccccgattactttttgatcgatcccggcatcggccgttttctctaccgcctggcacgccgcgccgcaggcaaggcagaagccagatggttgttcaagacgatctacgaacgcagtggcagcgccggagagttcaagaagttctgtttcaccgtgcgcaagctgatcgggtcaaatgacctgccggagtacgatttgaaggaggaggcggggcaggctggcccgatcctagtcatgcgctaccgcaacctgatcgagggcgaagcatccgccggttcctaatgtacggagcagatgctagggcaaattgccctagcaggggaaaaaggtcgaaaaggtctctttcctgtggatagcacgtacattgggaacccaaagccgtacattgggaaccggaacccgtacattgggaacccaaagccgtacattgggaaccggtcacacatgtaagtgactgatataaaagagaaaaaaggcgatttttccgcctaaaactctttaaaacttattaaaactcttaaaacccgcctggcctgtgcataactgtctggccagcgcacagccgaagagctgcaaaaagcgcctacccttcggtcgctgcgctccctacgccccgccgcttcgcgtcggcctatcgcggccgctggccgctcaaaaatggctggcctacggccaggcaatctaccagggcgcggacaagccgcgccgtcgccactcgaccgccggcgcccacatcaaggcaccctgcctcgcgcgtttcggtgatgacggtgaaaacctctgacacatgcagctcccggagacggtcacagcttgtctgtaagcggatgccgggagcagacaagcccgtcagggcgcgtcagcgggtgttggcgggtgtcggggcgcagccatgacccagtcacgtagcgatagcggagtgtatactggcttaactatgcggcatcagagcagattgtactgagagtgcaccatatgcggtgtgaaataccgcacagatgcgtaaggagaaaataccgcatcaggcgctcttccgcttcctcgctcactgactcgctgcgctcggtcgttcggctgcggcgagcggtatcagctcactcaaaggcggtaatacggttatccacagaatcaggggataacgcaggaaagaacatgtgagcaaaaggccagcaaaaggccaggaaccgtaaaaaggccgcgttgctggcgtttttccataggctccgcccccctgacgagcatcacaaaaatcgacgctcaagtcagaggtggcgaaacccgacaggactataaagataccaggcgtttccccctggaagctccctcgtgcgctctcctgttccgaccctgccgcttaccggatacctgtccgcctttctcccttcgggaagcgtggcgctttctcatagctcacgctgtaggtatctcagttcggtgtaggtcgttcgctccaagctgggctgtgtgcacgaaccccccgttcagcccgaccgctgcgccttatccggtaactatcgtcttgagtccaacccggtaagacacgacttatcgccactggcagcagccactggtaacaggattagcagagcgaggtatgtaggcggtgctacagagttcttgaagtggtggcctaactacggctacactagaaggacagtatttggtatctgcgctctgctgaagccagttaccttcggaaaaagagttggtagctcttgatccggcaaacaaaccaccgctggtagcggtggtttttttgtttgcaagcagcagattacgcgcagaaaaaaaggatctcaagaagatcctttgatcttttctacggggtctgacgctcagtggaacgaaaactcacgttaagggattttggtcatgcattctaggtactaaaacaattcatccagtaaaatataatattttattttctcccaatcaggcttgatccccagtaagtcaaaaaatagctcgacatactgttcttccccgatatcctccctgatcgaccggacgcagaaggcaatgtcataccacttgtccgccctgccgcttctcccaagatcaataaagccacttactttgccatctttcacaaagatgttgctgtctcccaggtcgccgtgggaaaagacaagttcctcttcgggcttttccgtctttaaaaaatcatacagctcgcgcggatctttaaatggagtgtcttcttcccagttttcgcaatccacatcggccagatcgttattcagtaagtaatccaattcggctaagcggctgtctaagctattcgtatagggacaatccgatatgtcgatggagtgaaagagcctgatgcactccgcatacagctcgataatcttttcagggctttgttcatcttcatactcttccgagcaaaggacgccatcggcctcactcatgagcagattgctccagccatcatgccgttcaaagtgcaggacctttggaacaggcagctttccttccagccatagcatcatgtccttttcccgttccacatcataggtggtccctttataccggctgtccgtcatttttaaatataggttttcattttctcccaccagcttatataccttagcaggagacattccttccgtatcttttacgcagcggtatttttcgatcagttttttcaattccggtgatattctcattttagccatttattatttccttcctcttttctacagtatttaaagataccccaagaagctaattataacaagacgaactccaattcactgttccttgcattctaaaaccttaaataccagaaaacagctttttcaaagttgttttcaaagttggcgtataacatagtatcgacggagccgattttgaaaccgcggtgatcacaggcagcaacgctctgtcatcgttacaatcaacatgctaccctccgcgagatcatccgtgtttcaaacccggcagcttagttgccgttcttccgaatagcatcggtaacatgagcaaagtctgccgccttacaacggctctcccgctgacgccgtcccggactgatgggctgcctgtatcgagtggtgattttgtgccgagctgccggtcggggagctgttggctggctggtggcaggatatattgtggtgtaaacaaattgacgcttagacaacttaataacacattgcggacgtttttaatgtactgaattaacgccgaattaa

1. A process for the enhanced nitrogen assimilation, accumulation and/or utilization and/or for the increased total nitrogen content in a photosynthetic active organism, comprising
a) increasing or generating the activity of a ammonium transporter in a photosynthetic organism, or
b) increasing or generating glucose-6-phosphate-dehydrogenase activity in a photosynthetic organism, preferably in the plastids of such organisms, and
c) growing the photosynthetic active organism under conditions which permit the enhanced nitrogen assimilation, accumulation and/or utilization and/or for the increased total nitrogen content.

2. The process of claim 1 comprising
(a) increasing or generating the activity of a protein encoded by the nucleic acid sequences as shown in table I, column 5, in an organelle of a non-human organism, or
(b) increasing or generating the activity of a protein encoded by the nucleic acid sequences as shown in table I, column 5, which are joined to a nucleic acid sequence encoding a transit peptide in a non-human organism, or in one or more parts thereof; or
(c) increasing or generating the activity of a protein encoded by the nucleic acid sequences as shown in table I, column 5, which are joined to a nucleic acid sequence encoding chloroplast localization sequence, in a non-human organism, or in one or more parts thereof, and
(d) growing the photosynthetic organism under conditions which permit the enhanced nitrogen assimilation, accumulation and/or utilization and/or for the increased total nitrogen content.

3. A process for the enhanced nitrogen assimilation, accumulation and/or utilization and/or for the increased total nitrogen content in photosynthetic active organisms, comprising, increasing or generating in an organism or a part or a compartment thereof the expression of at least one nucleic acid molecule comprising a nucleic acid molecule selected from the group consisting of:
a) a nucleic acid molecule encoding a polypeptide as shown in table II, columns 5 and 7, or a fragment thereof, which confers enhanced nitrogen assimilation, accumulation and/or utilization and/or for the increased total nitrogen content,
b) a nucleic acid molecule comprising a nucleic acid molecule as shown in table I, columns 5 and 7, which confers enhanced nitrogen assimilation, accumulation and/or utilization and/or for the increased total nitrogen content,
c) a nucleic acid molecule whose sequence can be deduced from a polypeptide sequence encoded by a nucleic acid molecule of (a) or (b) as a result of the degeneracy of the genetic code and which confers enhanced nitrogen assimilation, accumulation and/or utilization and/or for the increased total nitrogen content,
d) a nucleic acid molecule which encodes a polypeptide which has at least 50% identity with the amino acid sequence of the polypeptide encoded by the nucleic acid molecule of (a) to (c) and which confers enhanced nitrogen assimilation, accumulation and/or utilization and/or for the increased total nitrogen content,
e) a nucleic acid molecule which hybidizes with a nucleic acid molecule of (a) to (c) under stringent hybridisation and which confers enhanced nitrogen assimilation, accumulation and/or utilization and/or for the increased total nitrogen content,
f) a nucleic acid molecule which encompasses a nucleic acid molecule which is obtained by amplifying nucleic acid molecules from a cDNA library or a genomic library using the primers or primer pairs as indicated in table III, column 7, and which confers enhanced nitrogen assimilation, accumulation and/or utilization and/or for the increased total nitrogen content,
g) a nucleic acid molecule encoding a polypeptide which is isolated with the aid of monoclonal antibodies against a polypeptide encoded by one of the nucleic acid molecules of (a) to (f) and which confers enhanced nitrogen assimilation, accumulation and/or utilization and/or for the increased total nitrogen content,
h) a nucleic acid molecule encoding a polypeptide comprising a consensus as shown in table IV, columns 7, and which confers enhanced nitrogen assimilation, accumulation and/or utilization and/or for the increased total nitrogen content, and
i) a nucleic acid molecule which is obtainable by screening a suitable nucleic acid library under stringent hybridization conditions with a probe comprising one of the sequences of the nucleic acid molecule of (a) to (k) or with a fragment thereof having at least 15 nt, preferably 20 nt, 30 nt, 50 nt, 100 nt, 200 nt or 500 nt of the nucleic acid molecule characterized in (a) to (k) and which confers enhanced nitrogen assimilation, accumulation and/or utilization and/or for the increased total nitrogen content,
or comprising a sequence which is complementary thereto.

4. The process of claim 1, wherein the nucleic acid coding for a polypeptide with said increased or generated activity of a ammonium transporter or glucose-6-phosphate-dehydrogenase is derived from an microorganism.

5. The process of claim 3, wherein the activity of said protein or the expression of said nucleic acid molecule is increased or generated transiently or stably.

6. An isolated nucleic acid molecule comprising a nucleic acid molecule selected from the group consisting of:
a) a nucleic acid molecule encoding a polypeptide as shown in table II, columns 5 and 7, or a fragment thereof, and which confers enhanced nitrogen assimilation, accumulation and/or utilization and/or for the increased total nitrogen content in a photosynthetic organism or a part thereof;
b) a nucleic acid molecule comprising of a nucleic acid molecule as shown in table IB, columns 5 and 7, and which confers enhanced nitrogen assimilation, accumulation and/or utilization and/or for the increased total nitrogen content in a photosynthetic organism or a part thereof;
c) a nucleic acid molecule whose sequence can be deduced from a polypeptide sequence encoded by a nucleic acid molecule of (a) or (b) as a result of the degeneracy of the genetic code and which confers enhanced nitrogen assimilation, accumulation and/or utilization and/or for the increased total nitrogen content in a photosynthetic organism or a part thereof;
d) a nucleic acid molecule which encodes a polypeptide which has at least 50% identity with the amino acid sequence of the polypeptide encoded by tie nucleic acid molecule of (a) to (c) and which confers enhanced nitrogen assimilation, accumulation and/or utilization and/or for the increased total nitrogen content in a photosynthetic organism or a part thereof;
e) a nucleic acid molecule which hybridizes with a nucleic acid molecule of (a) to (c) under stringent hybridisation conditions and which confers enhanced nitrogen assimilation, accumulation and/or utilization and/or for the increased total nitrogen content in a photosynthetic organism or a part thereof;
f) a nucleic acid molecule which encompasses a nucleic acid molecule which is obtained by amplifying nucleic acid molecules from a cDNA library or a genomic library using the primers or primer pairs as shown in table III, column 7, and which confers enhanced nitrogen assimilation, accumulation and/or utilization and/or for the increased total nitrogen content in a photosynthetic organism or a part thereof;
g) a nucleic acid molecule encoding a polypeptide which is isolated with the aid of monoclonal antibodies against a polypeptide encoded by one of the nucleic acid molecules of (a) to (f) and conferring and which confers enhanced nitrogen assimilation, accumulation and/or utilization and/or for the increased total nitrogen content in a photosynthetic organism or a part thereof;
h) a nucleic acid molecule encoding a polypeptide comprising a consensus as shown in table IV, column 7, and which confers enhanced nitrogen assimilation, accumulation and/or utilization in a photosynthetic organism or a part thereof; and
i) a nucleic acid molecule which is obtainable by screening a suitable nucleic acid library under stringent hybridization conditions with a probe comprising one of the sequences of the nucleic acid molecule of (a) to (k) or with a fragment thereof having at least 15 nt, preferably 20 nt, 30 nt, 50 nt, 100 nt, 200 nt or 500 nt of the nucleic acid molecule characterized in (a) to (k) and which confers enhanced nitrogen assimilation, accumulation and/or utilization and/or for the increased total nitrogen content in a photosynthetic organism or a part thereof,
whereby the nucleic acid molecule distinguishes over the sequence as indicated in Table I A or I B, preferably distinguishes over the sequence as indicated in Table I A by one or more nucleotides.

7. An isolated nucleic acid molecule comprising a nucleic acid molecule selected from the group consisting of:
a) a nucleic acid molecule encoding a polypeptide as shown in table II B, column 7, or a fragment thereof, and which confers enhanced nitrogen assimilation, accumulation and/or utilization and/or for the increased total nitrogen content in a photosynthetic organism or a part thereof;
b) a nucleic acid molecule comprising of a nucleic acid molecule as shown in table I B, column 7, and which confers enhanced nitrogen assimilation, accumulation and/or utilization and/or for the increased total nitrogen content in a photosynthetic organism or a part thereof;
c) a nucleic acid molecule whose sequence can be deduced from a polypeptide sequence encoded by a nucleic acid molecule of (a) or (b) as a result of the degeneracy of the genetic code and which confers enhanced nitrogen assimilation, accumulation and/or utilization and/or for the increased total nitrogen content in a photosynthetic organism or a part thereof;
d) a nucleic acid molecule which encodes a polypeptide which has at least 50% identity with the amino acid sequence of the polypeptide encoded by the nucleic acid molecule of (a) to (c) and which confers enhanced nitrogen assimilation, accumulation and/or utilization and/or for the increased total nitrogen content in a photosynthetic organism or a part thereof;
e) a nucleic acid molecule which hybridizes with a nucleic acid molecule of (a) to (c) under stringent hybridization conditions and which confers enhanced nitrogen assimilation, accumulation and/or utilization and/or for the increased total nitrogen content in a photosynthetic organism or a part thereof;
f) a nucleic acid molecule which encompasses a nucleic acid molecule which is obtained by amplifying nucleic acid molecules from a cDNA library or a genomic library using the primers or primer pairs as shown in table III, column 7, and which confers enhanced nitrogen assimilation, accumulation and/or utilization and/or for the increased total nitrogen content in a photosynthetic organism or a part thereof;
g) a nucleic acid molecule encoding a polypeptide which is isolated with the aid of monoclonal antibodies against a polypeptide encoded by one of the nucleic acid molecules of (a) to (f) and which confers enhanced nitrogen assimilation, accumulation and/or utilization and/or for the increased total nitrogen content in a photosynthetic organism or a part thereof;
h) a nucleic acid molecule encoding a polypeptide comprising a consensus as shown in table IV, column 7, and which confers enhanced nitrogen assimilation, accumulation and/or utilization and/or for the increased total nitrogen content in a photosynthetic organism or a part thereof; and
i) a nucleic acid molecule which is obtainable by screening a suitable nucleic acid library under stringent hybridization conditions with a probe comprising one of the sequences of the nucleic acid molecule of (a) to (k) or with a fragment thereof having at least 15 nt, preferably 20 nt, 30 nt, 50 nt, 100 nt, 200 nt or 500 nt of the nucleic acid molecule characterized in (a) to (k) and which confers enhanced nitrogen assimilation, accumulation and/or utilization and/or for the increased total nitrogen content in a photosynthetic organism or a part thereof.

8. A nucleic acid construct which confers the expression of the nucleic acid molecule of claim 6, comprising one or more regulatory elements.

9. A vector comprising the nucleic acid molecule as claimed in claim 6 or a nucleic acid construct conferring the expression of said nucleic acid molecule and comprising one or more regulatory elements.

10. The vector as claimed in claim 9, wherein the nucleic acid molecule is in operable linkage with regulatory sequences for the expression in a prokaryotic or eukaryotic, or in a prokaryotic and eukaryotic, host.

11. A host cell, which has been transformed stably or transiently with the nucleic acid molecule as claimed in claim 6, a nucleic acid construct conferring the expression of said nucleic acid molecule and comprising one or more regulatory elements, a vector comprising said nucleic acid molecule or said nucleic acid construct, or a vector comprising said nucleic acid molecule or said nucleic acid construct with the nucleic acid molecule in operable linkage with regulatory sequences for the expression in a prokaryotic or eukaryotic host.

12. The host cell of claim 11, which is a transgenic host cell.

13. The host cell of claim 11, which is a plant cell.

14. A process for producing a polypeptide, comprising obtaining the host cell of claim 11, and expressing the polypeptide encoded by the nucleic acid molecule in said host cell.

15. A polypeptide encoded by the nucleic acid molecule as claimed in claim 6, whereby the polypeptide distinguishes over a sequence as indicated in Table IIA by one or more amino acids.

16. An antibody, which binds specifically to the polypeptide as claimed in claim 15.

17. A plant tissue, propagation material, harvested material or a plant comprising the host cell as claimed in claim 13 which is plant cell or an Agrobacterium.

18. A method for the identification of a gene product conferring enhanced nitrogen assimilation, accumulation and/or utilization and/or for the increased total nitrogen content in a photosynthetic organism or a part thereof comprising the following steps:
a) contacting the nucleic acid molecules of a sample, which can contain a candidate gene encoding a gene product conferring enhanced nitrogen assimilation, accumulation and/or utilization and/or for the increased total nitrogen content in a photosynthetic organism or a part thereof after expression with the nucleic acid molecule of claim 6;
b) identifying the nucleic acid molecules, which hybridise under relaxed stringent conditions with the nucleic acid molecule of claim 6;
c) introducing the candidate nucleic acid molecules in host cells appropriate for enhanced nitrogen assimilation, accumulation and/or utilization and/or for the increased total nitrogen content;
d) expressing the identified nucleic acid molecules in the host cells;
e) assaying the nitrogen assimilation, accumulation and/or utilization and/or for the increased total nitrogen content; and
f) identifying nucleic acid molecule and its gene product which expression confers an increased nitrogen assimilation, accumulation and/or utilization and/or for the increased total nitrogen content in the host cell in the host cell after expression compared to the wild type.

19. A method for the identification of a gene product conferring enhanced nitrogen assimilation, accumulation and/or utilization and/or for the increased total nitrogen content in a photosynthetic organism or a part thereof comprising the following steps:
a) identifying in a data bank nucleic acid molecules of an organism; which can contain a candidate gene encoding a gene product conferring an enhanced nitrogen assimilation, accumulation and/or utilization and/or for the increased total nitrogen content in a photosynthetic organism or a part thereof after expression, and which are at least 20% homolog to the nucleic acid molecule of claim 6;
b) introducing the candidate nucleic acid molecules in host cells appropriate enhanced nitrogen assimilation, accumulation and/or utilization and/or for the increased total nitrogen content;
c) expressing the identified nucleic acid molecules in the host cells;
d) assaying the nitrogen assimilation, accumulation and/or utilization and/or for the increased total nitrogen content; and
e) identifying nucleic acid molecule and its gene product which expression confers an increased nitrogen assimilation, accumulation and/or utilization and/or for the increased total nitrogen content in the host cell in the host cell after expression compared to the wild type.

20. A composition comprising the nucleic acid molecule of claim 6, a polypeptide that is encoded by said nucleic acid molecule and distinguishes over a sequence as indicated in Table IIA by one or more amino acids, a nucleic acid construct conferring the expression of said nucleic acid molecule and comprising one or more regulatory elements, a vector comprising said nucleic acid molecule or said nucleic acid construct, a vector comprising said nucleic acid molecule or said nucleic acid construct with the nucleic acid molecule in operable linkage with regulatory sequences for the expression in a prokaryotic or eukaryotic host, a gene product identified by said nucleic acid molecule, an antibody which binds specifically to said polypeptide, and optionally an agricultural acceptable carrier.

21. A method for the identification of a nucleic acid molecule conferring an increased nitrogen assimilation, accumulation and/or utilization and/or for the increased total nitrogen content in the host cell in the host cell after expression compared to the wild type, comprising utilizing the nucleic acid molecule of claim 6 for said identification.

22. A method for identifying compounds capable of conferring a modulation of nitrogen assimilation, accumulation and/or utilization and/or for the increased total nitrogen content in an organism or part thereof, comprising utilizing a polypeptide that is encoded by the nucleic acid molecule of claim 6 and distinguishes over a sequence as indicated in Table IIA by one or more amino acids, or a nucleic acid construct conferring the expression of said nucleic acid molecule and comprising one or more regulatory elements, or a gene product identified by said nucleic acid molecule for said identification.

23. Agrochemical, pharmaceutical, food or feed composition comprising the nucleic acid molecule of claim 6, a polypeptide that is encoded by said nucleic acid molecule and distinguishes over a sequence as indicated in Table IIA by one or more amino acids, a nucleic acid construct conferring the expression of said nucleic acid molecule and comprising one or more regulatory elements, a vector comprising said nucleic acid molecule or said nucleic acid construct, a vector comprising said nucleic acid molecule or said nucleic acid construct with the nucleic acid molecule in operable linkage with regulatory sequences for the expression in a prokaryotic or eukaryotic host, an antibody which binds specifically to said polypeptide, a host cell or a plant cell which has been transformed stably or transiently with said nucleic acid molecule, said nucleic acid construct, or said vector, a plant, plant tissue, or harvest material comprising said plant cell, or a gene product identified by said nucleic acid molecule.

24. A host plant cell of claim 13, which is resistant to a herbicide inhibiting the assimilation, accumulation and/or utilization of nitrogen and/or inhibiting the increasing of the total nitrogen content.

25. The process of claim 1, characterized by enhanced total yield (biomass) or protein yield (mass).

26. The process of claim 1, characterized by enhanced total yield of biomass or protein mass.

27. The process of claim 1, characterized by enhanced growth of plants under nitrogen limiting conditions.

28. (canceled)

29. (canceled)

30. A method for obtaining enhanced total yield in biomass, preferably seed or yield in protein mass, comprising utilizing the nucleic acid molecule of claim 6, a polypeptide that is encoded by said nucleic acid molecule and distinguishes over a sequence as indicated in Table IIA by one or more amino acids, a nucleic acid construct conferring the expression of said nucleic acid molecule and comprising one or more regulatory elements, a vector comprising said nucleic acid molecule or said nucleic acid construct, a vector comprising said nucleic acid molecule or said nucleic acid construct with the nucleic acid molecule in operable linkage with regulatory sequences for the expression in a prokaryotic or eukaryotic host, a host cell or a plant cell which has been transformed stably or transiently with said nucleic acid molecule, said nucleic acid construct, or said vector, a plant, plant tissue, or harvest material comprising said plant cell, or a gene product identified by said nucleic acid molecule in said method.

31. A method for obtaining enhanced growth or yield under nitrogen limiting conditions, comprising utilizing the nucleic acid molecule of claim 6, a polypeptide that is encoded by said nucleic acid molecule and distinguishes over a sequence as indicated in Table IIA by one or more amino acids, a nucleic acid construct conferring the expression of said nucleic acid molecule and comprising one or more regulatory elements, a vector comprising said nucleic acid molecule or said nucleic acid construct, a vector comprising said nucleic acid molecule or said nucleic acid construct with the nucleic acid molecule in operable linkage with regulatory sequences for the expression in a prokaryotic or eukaryotic host, a host cell or a plant cell which has been transformed stably or transiently with said nucleic acid molecule, said nucleic acid construct, or said vector, a plant, plant tissue, or harvest material comprising said plant cell, or a gene product identified by said nucleic acid molecule in said method.
